United States Patent Application Publication US 2021/0283234 A1 - sequence listing, part 4

SEQ ID NO: 3 - DNA, 4870265 bp, Artificial Sequence (residues 1-1,623,422 of 4,870,265)
  NCBI Ref Sequence NC_016855.1; Salmonella enterica subsp. enterica serovar Typhimurium str. 14028S, complete geneome
agagattacgtctggttgcaagagatcatgacagggggaattggttgaaaataaatatatcgccagcagcacatgaacaagtttcggaatgtgatcaatttaaaaatttattgacttaggcgggcagatactttaaccaatataggaatacaagacagacaaataaaaatgacagagtacacaacatccatgaaccgcatcagcaccaccaccattaccaccatcaccattaccacaggtaacggtgcgggctgacgcgtacaggaaacacagaaaaaagcccgcacctgaacagtgcgggcttttttttcgaccagagatcacgaggtaacaaccatgcgagtgttgaagttcggcggtacatcagtggcaaatgcagaacgttttctgcgtgttgccgatattctggaaagcaatgccaggcaagggcaggtagcgaccgtactttccgcccccgcgaaaattaccaaccatctggtggcaatgattgaaaaaactatcggcggccaggatgctttgccgaatatcagcgatgcagaacgtattttttctgacctgctcgcaggacttgccagcgcgcagccgggattcccgcttgcacggttgaaaatggttgtcgaacaagaattcgctcagatcaaacatgttctgcatggtatcagcctgctgggtcagtgcccggatagcatcaacgccgcgctgatttgccgtggcgaaaaaatgtcgatcgcgattatggcgggacttctggaggcgcgtgggcatcgcgtcacggtgatcgatccggtagaaaaattgctggcggtgggccattaccttgaatctaccgtcgatatcgcggaatcgactcgccgtatcgccgccagccagatcccggccgatcacatgatcctgatggcgggctttaccgccggtaatgaaaagggtgaactggtggtgctgggccgtaatggttccgactattccgccgccgtgctggccgcctgtttacgcgctgactgctgtgaaatctggactgacgtcgatggcgtgtatacctgtgacccgcgccaggtgccggacgccaggctgctgaaatcgatgtcctaccaggaagcgatggaactctcttacttcggcgccaaagtccttcaccctcgcaccattacgcccatcgcccagttccagatcccctgtctgattaaaaataccggtaatccgcaggcgccaggaacgctgatcggcgcgtccagcgacgatgataacctgccggttaaagggatctctaaccttaacaacatggcgatgtttagcgtctccggcccgggaatgaaagggatgattgggatggcggcgcgtgttttcgccgccatgtctcgcgccgggatctcggtggtgctcattacccagtcctcctctgagtacagcatcagtttctgtgtgccgcagagtgactgcgcgcgtgcccgccgtgcgatgcaggatgagttctatctggagctgaaagaggggctgctggagccgctggcggttacggagcggttggcgattatctctgttgtcggcgacggtatgcgcacgctacgcggcatttcagcgaaattcttcgccgcgctggcgcgggctaatatcaatatcgtggcgatcgctcagggatcttctgagcgttctatttctgtggtggtgaataacgacgatgccaccaccggcgtgcgggtaacgcaccagatgctgttcaataccgatcaggtgattgaagtgtttgtcattggcgtcggcggcgtcggcggcgcgctactggaacagcttaaacgtcagcaaacctggctgaagaacaagcacatcgatctacgcgtgtgcggcgtggcgaactcaaaggcgttgctaaccaatgtgcatggcctgaatctggacaactggcaggcggaactggcgcaagcgaacgcgccgttcaatctgggacgcttaattcgcctggtgaaagaatatcatctactcaatccggtgattgttgattgtacctccagtcaggcggtggccgaccagtatgccgacttcctgcgtgaagggttccatgtggtgacgccaaacaagaaagcgaacacctcgtcaatggactactaccatcagctacgtttcgccgccgcgcaatcacggcgcaaattcttgtatgacaccaacgtcggcgccggtttgccggtaatcgaaaacctgcaaaacctgctgaatgccggtgatgaactgcaaaaattttccggcattctttccgggtcgctctcttttattttcggtaaactggaagaggggatgagtctctcacaggcgaccgccctggcgcgcgagatgggctataccgaacccgatccgcgcgacgatctttccggtatggatgtggcgcgtaaactgttgatcctcgcccgcgagacgggccgcgagctggagctttccgatattgtgattgaaccggtgttgccgaacgagtttgacgcctccggcgatgtgaccgcctttatggcacatctgccgcagcttgacgacgcgtttgccgcccgtgtggcgaaagctcgtgatgaaggtaaggtattgcgctatgtgggcaatatcgaagaggatggcgtgtgccgcgtgaaaattgccgaagttgatggtaacgatccgctcttcaaagtgaaaaacggtgaaaacgcgctggcgttctacagccactattatcagcccttgccgttggtgctgcgcggctacggcgcaggcaatgatgtgacggcggcgggcgtgtttgccgatctgttacggaccctctcatggaagttaggagtttaacatggtgaaagtgtatgccccggcttccagcgcgaacatgagcgtcggtttcgacgtgttgggcgcagccgtcacacccgttgacggcacgttgctgggcgatgtggtatccgttgaagcagcggaccatttccgtctgcataacctggggcgatttgccgataaactgccgccggagccgcgtgaaaatattgtttatcagtgctgggaacgtttttgccaggcattggggaaaaccatcccggtggcgatgacgctggaaaaaaatatgccgattggttccgggttagggtccagcgcctgttccgtcgtcgccgcgctggtcgcgatgaatgagcactgcggcaaaccgttaaacgacacgcgtctgttggcgctgatgggcgagctggaaggccgtatctccggcagcatccattacgataacgtcgcgccgtgctttcttggcggtatgcagttgatgattgaagaaaacggcattattagtcagcaggtgccgggctttgatgagtggctatgggtactggcttatccgggcattaaagtttctaccgcagaagcacgggccattttgcctgcgcagtatcgccgtcaggattgcattgcgcatggacggcatctggccggttttattcacgcctgttactcgcggcagccgcagcttgccgccgcgctgatgaaagatgttattgccgaaccataccgcgcgcgtttactgccgggctttagccaggcgcggcaggcggtgtcggagatcggcgcgctggcgagcgggatttccgggtcggggccgacgctgtttgcgctatgcgataaaccggagacggcgcagcgcgtcgcggactggctgagcaaacattatctgcaaaatcaggaaggcttcgttcatatttgccggctggatacggcgggcgcacgagtagtgggataatcaatgaaactctataatctgaaagaccataatgagcaggtcagctttgcgcaggccgtcacgcaaggactgggcaaacagcagggacttttttttccgcacgatctgccggagtttagcctgacggaaattgatgagatgctcaaccaggactttgtcagccgtagcgcaaagatcctctcggcatttattggcgatgaaataccgcagcaaattctggaagagcgcgtccgcgcggcgtttgcgttcccggcaccggtagcgcaggtagaaagcgatgtcggctgcctggagctgttccatggtccgacgctggcctttaaagacttcggcgggcgttttatggcgcaaatgctgacgcatatcagcggcgacaaaccggtgacgattctgactgcaacgtcaggcgataccggcgcggcggtggctcacgcgttctatggcctggaaaatgtgcgggtcgtcattctctacccgcgcggtaagatcagtccgttgcaggaaaaactgttctgtacgctgggcggcaacattgaaaccgtggcgatcgacggcgatttcgacgcgtgccaggcgctggtgaaacaggcatttgatgacgaagaactgaaaacggcgctggggctgaattcggctaattcgattaatatcagccgcctgttggcgcaaatttgctactactttgaagccgtggcgcaactgccgcagggggcgcgtaaccaactggtgatctccgtccccagcggcaactttggcgatttgacggcagggctgctggcgaagtcgttaggcctaccggtgaaacgttttatcgccgccaccaacgtcaacgacacggtgccgcgttttctgcatgacggaaagtgggcgccgaaagcgacgcaggcgaccctgtcgaatgcgatggatgtcagccagccgaataactggccgcgcgtggaggagctattccgccgtaaaatctggcgcctgactgagctgggctatgcggcggtggatgatactacgacacagcagacgatgcgcgagctgaaagcgaaaggttatatctcggaacctcatgcggcggtagcgtatcgggcattacgcgaccagttaaaccctggcgagtatggcttgtttctcggaacggcgcatccggcgaagtttaaagagagcgtggagtccattctgggagaaacgctggccttgcctgaagcgctcgccgaacgcgccgacctgccgctgctttcacatcatctgcctgcggattttgccgccctgcgtaagctgatgatgacccgccaataaccattgcgcccggtggcgctgtcgcttaccgggcctatggggtggtgtcgatttgtaggccggataaggcgtaaccgccatccggcgatgccgttactgctcgtagcgtttaaagaccagctcgtcttgtgtggaggtttcttcatcaaagaaatacccttcacggtcaaacgcggtaagctgttccggcttcgttaagcggttttcaataataaaacggctcatcagtccgcgcgcttttttggcgtagaagcttaccaccttaaacttgccgtttttctcatcaaggaacacgggcttaatcagttcggcattcagtttcttcggcttcaccgatttaaaatattcctcggaggccagattcaccaccacccgatcgccctgcgcctcaagcgcttcgttgagcttatcggtaatgatatcgccccagaattgataaagatctttgccgcgcggattctccaggcgaatccccatctccagacgataaggctgcattaaatccagcgggcgcaatacgccatacaagccagagagcatacgcagatgttgttgagcaaaatcaaaatccgcgtcgttgaacgtttccgcctgtaggccggtataaacatcgcctttgaacgccagaatcgcctggcgtgcattatccggcgtaaaatgaggctgccagtcatgaaaacgcgtggcgttgagatccgccagtttgtcgctaattcccatcagcctggaaatttgcggcgccgaaagctggcgggcctgttgaataagctgctggctgtgatccaacagctccggctgggtatagcgggtcgtggccagcgggctttgataatcaagcgtttttgcaggtgaaatcagaatcagcatattcagtccttgcagggaattttctgcgactttagcaaaaaaacgccgcagagttgaccgatggttgcgattgtcggcttaatcgcgcgatgccgcctcccaggtatctggcgccagttgtggttcgatatccgggaagcgccgcggatcgaactgcggtcttacgcccagtttccgttgtcgcagataatcgctggcgagggtatacaccaccggtgagagcaacaaaatcgccgtcagattggtaatggccatacaggccatgatcatgtcagcgagctgccatatcagcggaaaactgataagcgtaccggcgataaccatgccaagcgtcgcaaggcgtaatagccagatagcctttgcgttatgtaaccgcagaaaaaacagattgttttcggcgtaaatatagttggcgacgatagaactgaacgcgaacagaatgacgataagcgcgacaaaactggcgccccattcaccggtcaacgaaaccattgcatgttggagaagctgaatgccttctgttgacgagtgggacgcgtgattccccgccagcaggataatcatcgcgctggcggtacagatgataatggtgtcgctgaatacgccaatcatttgcacaatcccctgcgcgacagggtgagggggatacgacgttgccgctgcggccgcattaggcgttgaccccattcccgcttcattagagaacatcccacgctgaaaaccgctggtaatagcctgggtgagcgtatatccggctgcgcctgccgcggcttcctgccagccaaatgcgcttttgactatcgaggcgataacgccaggcatttgctcaatatgccagaggcaaatgaatacgctgccggcgacccacaataacgcgatgaggggaatcagccattgcatcagacgggcgacgcctttgatgccgcgaatgataattaacagggcacagaacgccagagcaatgccggagataagcggcggaatgttgaaggcgaaatggagcgcgcgtgagacggcattcgcctgcacgctattaaaaatcaacccgtaggcgacgagcagaaagagggcgaaaaccacgcccatccagcgcattcccagcccacgcgccatataccacgccgggccgccgcggaactggcctgtcgggtcacgttctttataaagctgggcaagcgaacactcggcgaaggaggtcgccatgccaatgatggccgagacccacatccagaataccgcgccgggaccgcctgcggcgatagccagcgccacgccggccaggttaccgctgccaatccgcgccgcgaggctggtacacagagcctgaaatgacgtcaggccgcctggctgcgggctaaggctgcctttcagactgcggctaaattggcgaatataacgaaactgaatgaatccggtacgccaggtaaaccaacatcctgcgccgagcagcaggtaaatcattaccgagccccagagtatttcgttaataaaactgaaaaactcaggcattaacgtccctcttgttgatgccggcacgctttgataatcctgtataagcgtgacccatgatgtagatgaccttgtcagactaatattaacggcagtttaccataaatacggtggtatcctttaattgcgcatcaaccgtcggcagatacgcaaacagtgcacaagggcagccaggtgcatgtaggcggttgcgctgtgagtgcgtcgtgttatcatcagggtagaccggttacatcccctaacaagctgtttaaagagaaactctatcatgacggacaaattgacctcccttcgtcagttcaccaccgtagtggctgataccggagatatcgcggcaatgaaactgtatcagccgcaggatgctacaactaacccttctctcattcttaacgcagcgcaaatcccggaatatcgtaagctgattgacgatgctgtcgcctgggcgaaacagcagagcagcgaccgcgcgcagcaggttgttgacgcgaccgataagctggcggtgaatattggcctggagatcctgaagctggtgccggggcgtatttctaccgaagttgacgcgcgtctgtcttatgacactgaagcgtctatcgccaaagcaaaacgtatcattaaactctacaatgatgcgggtatcagcaacgatcgtatcctgatcaagctggcgtccacctggcagggcattcgtgcagccgaacagctggaaaaagaaggcatcaactgtaacctgacgctgctgttctccttcgcgcaggcgcgtgcgtgcgccgaagcgggcgtctacctgatctcgccgttcgtaggtcgtattcttgactggtataaagccaataccgacaagaaagactatgcgccagctgaagatccgggcgtggtttccgtaacggaaatctacgagtactacaaacagcatggttacgaaaccgtcgttatgggcgcaagcttccgtaacgtaggcgaaattctggagctggcgggctgcgaccgtctgactatcgcgccggcattgctgaaagaactggcggaaagcgaaggggcgattgagcgtaagctctctttctccggcgaagtcaaagcgcgcccggaacgcattaccgaagccgagttcctgtggcagcatcaccaggaccccatggcggttgacaaactggcggatggtatccgtaagtttgcggtagaccaggaaaaactggaaaaaatgatcggcgatctgctgtaatcattaacgcgtggccctgatatgggtcacgctacctcttctgaaacctgtctgtccttcccttcgcagtgtatcattctgtttaacgagactgtttaaacggaataatcatggataccttacgtattggcttagtttctatctccgaccgcgcttcaagcggcgtttaccaggataaaggcattcctgcgcttgaggagtggctcgcttctgcgctgaccacgcctttcgaggtccaacggcgcttaattcctgatgaacaggaaattatcgagcaaacgttgtgtgaactggtcgatgagatgagctgtcatctggtgctgaccactggcggtaccggtccggcgcgtcgcgacgtcacgccggacgcgacccttgccatcgccgaccgtgaaatgccaggttttggcgagcagatgcgccagatcagcctgcgctttgtgccgaccgccattctttcccgccaggtgggcgttatccgtaaacaggcgttaattcttaatctgcctggacagccaaaatcgatcaaagaaacgctggaaggcgtaaaagcggacgatggcagcgttagcgtgccgggcatttttgcgagcgtgccgtattgcatacagctgcttgacgggccgtatgtcgaaaccgcgccggaagtggttgccgctttccgtccaaagagcgccagacgtgagaatatgtcggactgaccggaaaatactgatagtagggttattcctcccggtgcgggaggaataaaagagatttagtgcgcctcgccgattggcagaatagtgcggccaaattgctcgtttagcacttcacccatcgccagataaatagcgctggcgccgcaaaccagaccaacccagcctgcgatatggatagttgcttcgttaccggtgatattgccgaccgccagcagagcgaacagtacggtcaggctcaggaaaacaaattgcagcgcgcgggcggctttcagcgtaccgaagaacataaacagcgtgaacacgccccacagacctaaataagcgccgagtagctgagcgtcaggcgcatccgtcagacccattttcggcatcagcaggatagcgaccagcgtcagccagaacgaaccgtaagaggtaaaggccgttaaaccaaaggtattgccttttttgtactccagcagaccggcaaaaatttgcgcgataccgccgtagaaaatccccatcgccagaataataccgtccagggcgaaaaaaccggcattgtgcaggttaagcagaatggtggtcatgccgaagcccatcaggcccagcggtgccggattagccaacttagtgttgcccataattcctcaaaatcatcataattgaatggtgaaatagtttcccagaataacgagttccgtattcggggcgcggcataataatcagggggaagaggactgtctatgatctaataagggggaaaagaaaatatttcccccagtgagggcattcacgcctgaacggctgccatcattcgtcgcaggcaggctatttgcaagaccgccggaatagtcacgcgatacgcgctgccgctcatcgctttgacgccgtttaacgccgcgccgaccgggccgccaagacctgcgccgcgcagcaatccgtggcccaggatgctcattgcggcatgggtacgcaaaatgcgggtaagctgggtggaaagcaggtgggagaccccttttgccagactgcgatctttcatgagcagcggcagcagttcttccagttcagaaactttggcgtctacggcttgcagaaattcctgcttatgcgccgcgtccatcttctgccaggtatgacgtaaaaaatgctccagcagttgctgttctatttcaaacgtcgacatgcttttatctgctttgagttttagccgttttgcgacatccagcagaatcgcgcggtactgttttccgtgtccgcgcaatttgttggcgatactgtcgccgccgtaatgctgaaactcgccggcaatgagctgccagttacggcggtgttgctccgggtgaccttccatcgctttgaacagctcgttatggctaagaacgctcgacaagcgagctttgcccttttcgttatgcgtcagcaaacgggcgaaatcggcgagttgttcttcgctacaatgctgaagaaagtctaaatcctcgtcgtgtaaataggtgacgttcattttcagtctggcttttggaatagaaataacagcgattaatcgtcgccaatgactttaagtctcgccatatcggaagaatttaccgtatggcctgagaaggtaatctttgatacgcagcgtttgttgtcgttatcgctattaatattgatccagcctgttgtctggccctctttgattgaggaagggacgttcaggctttggctggcgctacgcgcagttttaaaatagacggatgcgccgctaagttcgatgtcgccgtgatccgccgtgagttgaatgcgcttcacgatgcggcagacgggaattttcagcgtgagatcgttcgtttcatttctgggcatggcaataacacccagtattttatggtcgttcgcgtgcgcgacgctacttaacgccaggccgaaaagcaggccgacggaaatcgttaacacagatcgcatggaatttctctttgacgggttcaataagcaataccgtctatcatactctgctcatggcaacgattcagttttgtaatcttttctttttattacaatttttctgtgaatggtattcgttatttaatttatttcatgaatatttatctgtctggttttccatcgtgccctctcgtcactaaaaaattttttcatctcccccttgatgacgtgggttacgaccccatcttgtagtcaaccgcagtggtgagtctgaaaaaaaacgattcagggtagttgaaaccgcacgtttcgcccttattacagattcacaaccacatgatgaccgaatttttagtggagacgtttagatgggtaaaattattggtatcgacctgggtactaccaactcttgtgtagcgattatggatggaacgcaggcacgcgtgctggagaacgccgagggcgatcgcactacgccttctatcattgcttatacccaggatggtgaaactctggttggtcagccggctaaacgtcaggcagtgacaaacccgcaaaacaccctgtttgcgattaaacgcctgattggccgccgcttccaggacgaagaagttcaacgtgacgtttctatcatgccgtacaaaatcatcggcgccgacaacggcgacgcatggcttgatgtgaaaggtcagaaaatggcgccgccgcagatttctgccgaagtgctgaagaaaatgaagaaaacggctgaagattatctgggcgaaccggtaactgaagcggttatcaccgtaccggcttactttaacgatgcgcagcgtcaggcaaccaaagatgctggtcgtatcgcggggctggaagttaaacgtatcatcaacgaaccgactgccgcagcgctggcttacggtctggataaagaagtcggcaaccgtactatcgcggtttacgacctcggtggtggtactttcgatatctctattatcgaaatcgacgaagttgatggcgaaaaaacctttgaagttctggcaaccaacggtgatacccacctgggtggtgaagacttcgatacccgcctgatcaactacctcgttgacgagtttaagaaagatcagggcattgacctgcgtaacgatccgctggccatgcagcgcctgaaagaagccgcagaaaaagccaaaatcgagctgtcttctgcgcagcagaccgacgtgaacctgccgtacattaccgcagatgccaccggtccgaaacacatgaacatcaaagtgactcgtgcgaaactggaaagcctggttgaagatctggtgaaccgttctatcgagccgctgaaagtcgcactgcaggacgctggcctgtccgtgtctgatatcaacgacgtgatcctcgttggcggtcagacccgtatgccaatggtgcagaaaaaagtggctgagttctttggtaaagagccgcgtaaagacgttaacccggacgaagctgtggctatcggcgcagcggtacagggcggcgtgttgaccggtgatgtgaaagacgtactgctgctggacgttaccccgctgtctctgggtatcgaaacgatgggtggcgtgatgactccgcttatcaccaaaaacaccaccatcccgaccaagcacagccaggtgttctctactgcggaagacaaccagtctgcggtaaccatccatgtgctgcagggtgagcgtaagcgtgcgtctgataacaaatctctgggtcagttcaacctggatggcatcaacccggcgccgcgcggtatgccgcagatcgaagtcaccttcgatatcgatgctgacggtatcctgcacgtctccgcgaaagataaaaatagcggtaaagagcagaagatcactatcaaggcgtcttctggtctgaacgaggaagaaattcagaaaatggttcgcgatgcagaagcgaacgctgaatccgaccgtaagttcgaagagctggttcagacccgtaaccagggcgaccatctgctgcacagcacccgtaagcaggttgaagaagcaggcgataaactgccggctgatgacaaaaccgctatcgagtctgccctgaacgcgctggaaactgccctgaaaggcgaagataaagccgctatcgaagcgaaaatgcaggaactggcgcaggtttcccagaaactgatggaaatcgctcagcagcaacatgcgcagcagcaggctggctccgctgacgcttctgcaaacaacgcgaaagatgacgacgttgtcgacgctgagtttgaagaagtaaaagataaaaaataatcgccctttgaacgggtaattactggcacgggcgaagaggtttcctctccgcccgtgtatgcatgttaagggcagataaaaagagatggcgaaaagagattactacgagattttaggcgtttccaaaacagcggaagagcgtgaaatcaaaaaggcgtataagcgcctggccatgaaatatcatccggaccgcaatcagggtgataaagaggccgaagctaagtttaaagagattaaagaagcctacgaagtgctgaccgatgcgcaaaaacgcgcagcctacgatcagtatggtcacgccgcgtttgaacaaggcggtatgggcggcggatttggcggcggctttaatggcggcgctgatttcagtgatatctttggtgacgtttttggcgatatctttggcggcgggcgtggtcgccaacgtgcggcgcgtggggctgatttgcgttataacatggatctcaccctggaagaagcggtgcgtggcgtgaccaaagagatccgtattccgacgctggaggagtgcgacgtttgccacggcagcggcgcgaaagctggcacgcaaccgcaaacctgtccgacctgtcatggttctggtcaggtacagatgcgccagggattctttgctgtacagcagacctgcccacactgtcagggacgcggtacgctgatcaaagatccgtgccataaatgtcacggtcatgggcgtgttgaaaagagtaaaactctgtccgttaaaatcccggcgggcgtggataccggcgatcgtattcgtctggcaggcgagggcgaagcgggcgagcatggcgcaccggcaggcgacttgtacgttcaggtccaggtgaaacaacaccctattttcgagcgtgaaggcaataatctttattgcgaagtgccgatcaactttgcgatggcggcgctcggcggtgaaattgaagtgccgacgttagatggtcgcgtgatgctgaaagtaccgagcgaaacacaaacgggcaagctgttccgtatgcgcggcaaaggcgtgaagtccgtacgcggtggcgcgcagggcgatttgctgtgccgtgtggtagttgaaacgccggtcggtctgagcgaaaaacagaagcaattgctaaaagatcttcaggaaagttttggcggcccgacgggagagaaaaacagcccgcgttcaaaaagcttctttgacggcgtgaaaaaattctttgacgatttgactcgctaatcttttcccgttgtatttttcttcagcccgggtgtatatccgggcttttttctgcctgtacgcgcccaggcttctgttaaacgcatcgtatcctctcatttgttgatattttgtttttactgataaacaaattgatgttaatcagcagttttgtatacgcttattctttaaaaaaacgtgatgtgatgacattaatgattgcttttttagatgctgtgaattgatttatcttgagtattatctatattgctttttttagtttccggaggcagacagcgaatgggatcgaaaggtgccaacaagagctttgattataatttaatcaaaattcttgacgctgttattttgtcaggaaatgcggctatggcggcaaaaaagttaggcattacaccggctgccgtttctctggcgttaaagcgcctgcagagttattacccggaggaactgtttagcagagggaaaggcgggctcatccccacagctaaggctgtcgacattcaccaaaatttcagtcaggtgatgaaactggtggatgatacatttctctgtaatagcaaaaaagatgaagcgttccagataacgttattaggcagtgatattgttgaaagctattatctttctcagctctataacagcgatatatttgaccgtattttgataaatcatttctccgtaagaaatatgagtcgggagcatatcagcgaacttctgtttactgcgcaaggcgatctgttgattagtgccgaacctttgctggagtccggcatagagaatcaaatcattgatagttttaaatcatttgtttgtatctgcagcagtaaacacatgctgagtaccctctcacaactgtcgctacatcatttttattcttcgcgtcatgcgttatatcagccggggatgggggcttcagtgatatatcatgatagcgaattatttaaggatgatctttactatactggcaggcgtattgtcggctatcgcagtgattcgcttaacggtttgatgagcatgatcgaacgaacctcattgattgcattgatgcctttgaaattagcgcttttttataaaaatcatcgtaaatatgacattaaatttattcagcctccgcccgaactggctttgaagtcagttcaggtctatgcatcctggaataaaaatagtagaaatatatcgacgattaatgagatggtaagtatgttacaaacactttcctccttccgtcgctaatacacctcatttttacgctttgatttaatatggttttaaatgatgtgctttgatttttaccctcctgacagggcgcttacactccttgtgttaattattcatttataatgatttcggagtgttaaaatgtctattcccaaccatgtgtcgacaacggaagttgtgctattggagctagagatcttactcactattatttcgattggcgcgtggggaggctttgtcagctatcttttacgcaaagataagacagaatataatagttctcatgaaagtattaaatattgcttaacgcagatcgtgatttcctgcttcaccagtttcttgttaagcgcgattgcgatcgaaaaagaatgcagtttcaacattgttctgttggcggcaggcttaggcggtgttttcgcgagtccgatcttaaagattcttgggcggcggattaaaaaaattatcgaaggtaataattcagattaattatcatttgcagtatcaggctcatccgtgagccttttacgcgtcttttttcagcctggtctaggtcactctattcttgatccagccataaataaattgttcgttattgtggtttttctcagcaacgtttaagtagtacgtgccctgactgcaattgagggctttcaccaaaacggcttccccttcctggcctcgccaggccaaataatgttcgagagcggcaagcgtccgcgggccaatattgccatccacatgaatatccgggtagcgtttaccttcgtgattaaagacgttcaaccagcgttgcagccacgcgctggggtggtaagcgcctatgttgactgccgcatcgcacagctcgaaggagactggccacgatagcgtcgagatgacgtcaaaacctggttttatccagtaatcctcttcgagaatcgcgtaggcttcagcgtgggtcagatcccgcatatcgccagcatagccatgcgctcgcgccgtggcttcggtaatgccccaatgggtggcgccgcctttatctttagggttaaatacgtaaccgccttcaagcgcaataattccatctataattggattcatcttccctttccttcgcttagtgaatatgcagatacatgagagaacctaacgttactgaaaatacggtcgtcagggcggcgatggtttgccgtacaatctgtttttttcttccctttgtttcgctatccgtcgcgataatggtgatatcactattaactttgaggccttgtcttggaatggtaataaaaagatcgttaataccaagcgctttaaggtcacgtctgattaaatagagaatctgcgttagatttgcatcattaacataatggcttcgacttccccataacgcagtggttattttttgtcgctcgataatctccagatgagcattctcgatgatgaaactgagacatttggctctcatcgcagtcattttaataacctgtgaatttgagaccgtcctcagtttatatttaccttcattgtaaatgcaattgctattaatgatataagttttcataacgtcttcctttagaaatgtacatcctggttgtctgtggtgactatattgtatgagaaatgtcttaatccaataaatgtcactggttttattgtattgtcattgtctatagcgagtgtaatcacattatttcattgtaattaaatgatatttaattacatgataaatgatatttactatgttctcaccagaacggagtaagcgggcgctgagaggtgttgttttctcttcgttagacggtgttgttaacctcatttttatgatttttatatcatctaaaaagatgatgttttgtgattagctattttttatgcctgtaacgattatggaccccgcagaacgagctgcgacaattttgaaacgtaaaaggaaatttgaaaatggctacaagcaaactgattcaaggcgatacaattactgaaactactcatgcagcgaatggttttgaccctgcaacaagcgatgataaaataagctatacttccgctcgtgttgcgaaaccggtatacaataaatataaaaattccacgactaaaccgaaggtattcggttattacaccgactggtcacagtatgacagccgtctgcaaggcaatatgtcccaaccgggccgtggttatgatttaaccaaagtttcaccgacggcttatgacaaactgatttttggctttgttggcatcaccggtttcagaaaaattgatacagaagaccgcgatgtcgtagcagaagcggcagcgctgtgcggcaaagtgaaatatgagccgaccttcctcgacccatggggcgacttccagtcttatatcaacctcggctttgatgtcagcggctgggatgtggatccgaagactgtaactcagtctaacgccaagggtctgctgggcgcgctgcgtgatatgcaggcaaaagcgaaagccgcaggtcacacgctggcgctctccatgagtatcggcggctggagcatgagtaacgggttccacgaaaccgccgcttctgactcttctcgtaaaatcttcgccaaaggcgtggtgaaactgttcaaacagttcccgatgttcagcgaagtggatattgactgggaatacccgaacaatgaaggggcgggcaacccgtttggtccggaagatggcgctaactacgcgctgctgattgccgaactgcgtaaacagctggattccgcgggtctgagcaatgtgaagatctctattgccgcttctgctgtcactactatttttgactatgcgaaagtaaaagatctgatggctgccggcctgtatggcatcaacctgatgacctatgactttttcggtacgccgtgggcggaaacgctgggccaccacaccaaccgcaaagcgctggaagagggcggctgggctgtcgaaactatcgttgatcacctgctggcagaaggtttctccgctgaccgtatcaacatcggttatgccggctatacccgtaacgctcgtcaggtagaaattgaatccctgtcgccgctgaaaggttcttacaacccaggttcaggccctactaccggttccttcgaatccggcaccagcgaatggtatgacgtcatttatagctacctggatctggaaaaccagaaaggccgtaacggtttcaacgtttacaccgaccaggtcgctgatgctgactacctgtatagcccggaatccaaactgtttttatccctggatacgccgcgtactgtcaaagcaaaaggcgaatatgcagcgaaactgggcctgggcggcgtgtttacctggactatcgatcaggacaacggcgtgctggttaacgccgtgcgtgaaggtctgggttatgaaatcgaatctgaagttatcgatatggaaccgttctactttgaaggtatcaatgtagaaaaagatgaagagcagagcgacagcgacgacgcgcagaaggtcaaccacgcgccgaaagcggcgattgaactgatggttgtaggcggatctacggtacagctgtctggcgcaggttcttctgatgaagataacgatgagttgtcctttagctggggcgtgccttctcaaatcgatgtggcagacaaaacggcagaaatcattgaggttgtggtaccggaagttagcgaaaaaacagcctttcagttcaccctgtttgtacgcgactgctacaacgaaccgtcctctcaacagcgctttgttctgacggctgtgcctgcgctatctcaggttcaaccggaaccggaagaggaagaagagattatcgttcctgtaccggacgaggaagaagataccacgccggctgaggatgatacgccagcagatgacaaaacgtcaccttacgcgcagtgggatgcttctaccgtttatggcgcaaactggggttctttcgaaatcgttagctggaaaggccataactatcaggtgaaatggtggtctatgggcaaccagcctgacctgaactgcggtgtcggcggtgcatggaccgatcttggcgcttactaatacacggtattaagccgatgtattgggcttcatgattcaagccctggtttaccggggcttttctccaccagggacagaggaagagtagaccatgaccatttccattcacgccagcgcatttgacgtcaacagctggtatcaaaaaattaccttaactttcatcaatgagagcggtaatgcggtcgatatgaaccatgccgcaatatcattcacggcttccgggcacatcgatccatggggaaatagcggcggtacgctcaaagggaacctgccgcttacgctgaatgagagttcgtatggcacgctggaaactaacaacatcatcattaataacagcgatgcattacttcttcagccgggcgaacgcgggacgctctctttcagcctcgcggcgacgcaggtgccggtaaaaatgtccgccatcaccttgacgctggcgtcatcgtcatccgaagacgcagagtctgcaaccccatccgatcaggagacgccagcgatacccgccgcagacgaacaacccgccgaacccgatgtgccggaaaaggacaatgaccttcaggaacacggccttacgcttaacgttagcgagttgaataccgcaagttggtatcaacgcgtcacctttacgctgaccaacctctacgcccaggcggtagatctcaatcagcttcaactgaattttacggccagcgcgcaccccgatccctacagtccgtttcagggaacaatgttggggaatcaggccgtgacgctggccagcgatgggggatggcccatcgagaagaataccatcaccattaatcatgacggcgcgctgatactggcggcgggggataccgccgaattacagtgctatctggccgccacgcagacgccagttgccatcagcgatttgaacgcgacgttggcccatgatcctgcccgtcagggaaaagtttgcgttcattttcctgccatgacgcagaccgtggcgctcaaaccggtgattgagctgctgtttcctgccggcgaaacccggcgctttgtcggtgagtggggcgaggttctgacaataggcgatcttagcgcaggaacgtatcggcttaccgtaccggtactggcgaatgatgagatgcaaatcgcgccagtcgagtcctcttttaccgttacgctgcaatccggcgatgccgccgcgcaggtccaggtatcctgtctgccgattgtccgttatgccagcgcgcgtctgatgattgacgcccctgcgcttggtaatgcgaaattgaccgttgagatcgccgatgctacgcaagcggatgagcgtaccgtcacgctgatcgccaaccaaccgcagttaatcacccggctactggcggggcatcattatacggtcaatctgcagcctgcgatgattaataaccgctttatatcggcacccatacagcttacggggtttatccctgctgcggcgcagattgccgaggttgctgtcgcttaccaacagtcggcgctcgacacggcgagtttcgtgacggtggatgccactatactgggcctgcccgatggcgtcgcgccgcagcgttatctgttcagcagcggtaaatatcagtactcattaatgctggagagcggcagcgatcggcagacgttggcattacgctttgcacccgggctgtatgatgttcagacggacgacattttcatcgacagtgtgccgtggcgttgtgaacaggccgggccgctacggttgttgcaaaaggtcaaccatgtggcgctggagtttctgcccggcgtgacgctacaggtaaaaggttggcctgattaccttgctcatggcggcgtgacggttaacgcgccagagacggtttctctttatcgcgatataccgtttagcgcgttgtttaaatacgatggttttgacggcggcggcgatccggttccggccgcggaggttgacgtgaacggggatggttttctggattacgcgacgttaccgatccataaaaccgttgcgctggtgcgccagatagaaaaagaagccgggcgtagcgtcatgccggtaatggtcatttataccgcgaatgccagcggcggtagcgcgctggcggatttacaggatgcgcaaaagctacgtaaccattttggtaactttattacccagtgtctggcggcgcagtcatacaaagatgagacgcatcctgtcccggccacctttgtgcttaacccggattttctcggggcactacagcaaggaccgtatggctataccgtagtacggcaaaaaaacagtgtgccggtgaatgcccaactggcggcggcgatacaagcattaccggcgatggctggctttatcgcgccttcgttgccgacgtttagcgacgatctctacggctatattcaggcggtgaactatcttgttcgtcagtttgccccggatgtggcttttggctggcagacgaatgtctgggcgacaggaacggcggactgggtgctgcgcgataccgctgatccggtagctgaagggcaggcgatcgccggatttattcatgaactgggcgtttacagcggagaatatgcgccggactttattgcgtttgataaatttgagtgtgactgtttcagtcctgatgcgcttgcccactatggctggaatgcgacatgctggcttaattacctggcgatggtcaaacaggtgacgaaagcgctgctgacgcccgccatgctgtggcaaatcccaggcggccatatgcctacagtagaagagggcgtcagtaaaatcagcgctgcgcactttgcatccggcggaaccttttttatgggtgacgcccgcattggcagcgatcctgacacgctctctttgcagctactcaatacggccttaaatagcgcgacttacggcgtcccgaccgtcggcgactttttacgtaaagataaagggtatgactggggccaaatgcaggcgctgaacctaccggactttaacgtcttttcgatcttatggggcggtggttctactatcagtattacgacaatccattctaacggtgaagacggcggctggctggcggataaaatggtagagtattatgctgcccctcgctatttcagataatatcactgcttatttgcattaatctggactattagtttgagattcgaaggcgcgttctttcgaatctcttttcctgcgccccctgacctctcattctttatgcgtaatttgttattaattttctgtaatcattttgtattaagaattgtcttaatcttaaaaatattgcgtattagtgcgttgtgaatacagaaatactgcatagcgatgttatttattattaatttaagtactttttgagaggttatactgtgacgctacattgagtagacaaccgttaatgaaaaaaatgatgaacgacgcttttgctaaagataataatgagaattcattacactcttttcttttttctcagcaggctaaacctcacgcggcaattgatgccttattttcggccttgttgccatttggtcaaccgtttacgctgggtatcggcgatgagttttatttacaggcaaacgatgaacactacattgtattactggagtcaggcgttgtttctttctgtcatgatgacaaacgactccatatatcttcatcgtttgcgccatcggtcgtgggtatggttgacagctatggcgctacctataacgtccccgcgcgaccggaacactttttgctcgcagaaacggtttgtaccggtagatttgttcgcctgccggattttataaaaatcgccgatgaatgcgatttgtggcacgacgtggcccgttgtctggcttaccgtctgatggtgatgagcgcgcgcgatcgtgaattagtcggcgtcgattcttatctgaaagttcgggcgctgctgactgaaatctgggcttatccacaggcctaccgggaaagcattatcgtgttgaattttattcaacggcgtaccgggatatcgcgcagtcggaccatgaagattctgtctgaactaaaaaaaggcgggtatatccatattgataatgggcggctgacggcgctcggaaaactgccagtggcgtattaatgcactatccgcaacgatatatttacatatctcgactgaatttgcctggtatcgttaatagaatgttttactgaaggttgttatgaaagctatttttaaaaagtcaatatggctaaaggagataggccgaacgactggtgtaaagttaatataaaacaacaggttatgcctggtcctataaaaccaaatgtcgatgattgcaacttgccgttggcttgctaataattaataacatcgttatctcattataacgtaaagataaactcacgacgttgagtggctgttttattgcttctgacatttatatcagaacaagaagacactttttttcgcataagaaaaagtcgtgatattgctgtgaagaaatatcagcagccgtttcgttaaaaaatctgattacccttatttttatatttaaaaggagcttgaatgaaaaagcctgtactagcattaatggtctctgccattgcctttggcggaatgttgtccaccgcgcaagcggatactacaaccgtcactggcggtacggtaaattttgtcggacaggtcgttgacgccgcctgttctgtttccgctgactctgtcgatcagaccgtgacattaggccaggttcgcgccagtaaattaaccgaggccggtatggtggcgaatcaaaaagaagatttcaccatcaaactggaagactgcgatactcagaccagccagaatgcggcggtgatttttaatggccaacaggacgcaaaccagccggggtcgctggcgaataccgctggggcaggttcggcgacgaatgtggcattacaactttatggaccagatggccaggcgctgaatatcggtgaatcgtccagtactgttaccttgaatgatggcgaaaacgttattccgcttagcgtggattatatcgctaccggtacggcgactgccggtaatgttaccgcgacggcgacatttagcatggtttattcctgattccttatcgggatttttttctcgtctgttgggaggcgagaaaggggcgttacgcgcgtcactgcgcgtaacaaaccgacggcatcaggatattacgcagatgaaaaaaaacgtaccgattttccttcgattattgctactgctgtcggcggccggcctgtcgtttgccgcgcaggcgggaggcattgcgctgggcgcgaccagggtgatttatccgcagggaagtaagcaaacctccttgccgattattaattcttctgccagcaatgtttttttaattcagtcatgggtcgccaatgccgatggttcacgctcgacggattttatcattacgccgcctctctttgtgatccagcctaaaaaagaaaatatattacgtattatgtatgtcgggccgtcattaccgaccgatcgcgaaagcgtattttatttaaacagtaaagcgataccctctgtcgataaaaataaattgaccggcaactccctgcaaattgcgacgcaaagcgtgattaagctatttatccgcccgaaaaatctggcggaggcgccagctcatgccccgtcgacgcttcgctgccgtaacgagcgcggccagctaacgattactaacccttcgccgtactacgtttcgatggttgaactgtatagcgcggggaaaaaactgccgaatactatggtaccgccgaaaggcgcgatcactctcccggcgacgcccggccaggtatctttgcgcacggtaaacgattttggcgcaacgacgccagcacgcgtttgtccagcttcatgatgttatgcgtaatcagcttttcatgacgcgatattactccagcgtaactaaacccgtattaaccccgctggcgttggctatcgcactggcgcctgcgccggggtgggcggaaaactatttcaacccggcatttctgtctgacgacccgtctgcggtggccgacctatcgaccttttcccgtaatgcccaggcggcggggatgtatcgcgttgacgtttacctgaacaatacgtttctcgcaaccagagacattgccttccaggcggtgaaaacgacgggaaaaagcgcgcccaccgatgacagcggattacgcgcctgcctgacgcctgaaatgcttaaaaatatgggggtaaacaccggggcgtttccactgttggcgaaggcggcggcgggaagttgcccggatctcgccagtgcgataccggccgcccggacccgctttgattttgcgcagcaacgtctcgacattagcatcccgcaggcggcgatggttgccagcgccagaggctatatcccaccgaaatactgggatgaaggtattaatgcgttgctattgaattacacctttaccggcgcgaatagtcaggatcggagcccaggcggcagtgcggagaacagctattttcttggattgaatagcggccttaatctgggggcctggcggttacgcgactactccacatggaacgcgaatagcggcgatcagaatagcgacagcgactggcagcacatcagtacttatctggaacgtgatgtggtctttttgcagggagaactgacggcaggcgatagttataccccctccgcattattcgacagccttccttttcgcgggctacaactggcgtctgacgacaatatgttgccagacagcatgaagggcttcgcaccgaccattcacggcattgccagaagcaacgcgcaagtgaccattcggcaaaacggctacatcattaatcagcgctatgtgccgcccggggcatttactattaatgatctctatcctaccgccgccagcggcgatttgactgtggaagtcaaagagtccgacggttctattaatcgttataacgtgccctattccgccgtgccgattctacaacgagaagggcggctgaagtatgcggcgacggtggcggagtatcgcagcgatagtagtcaaaaagagaaggtgaaattcagtcaggcgaccttgatatgggggttaccgcatggttttacgctgtatggcggaacacaactttccagtcattatcacgcgctggcgatcggcagcggcgcaaatctgggcgactggggcgcggtgtcgctggatgtcacccaggctaccagtacgctggcggataataacacctaccaggggcaatcgctgcgtttcctgtatgccaaatcgcttgcacagtcaggaaccaatttacagcttatgggctatcgctattcaacctcgggcttttacacgttggatgataccacgtggaaacggatgagcggctatgacgatgacagtcggactgacagcgataaaagcaggccggaatgggcggattattacaacctttattacaccaggagggggaaagtacaactcgatatcaatcaacagctaggcgggttgggatcgctttttattaccggcagccagcaaagttactggcacactgatgaaaaggattctttgttgcaggtgggatacagcgatacgctggcgggtattgcatggagcgtttcttacaacaataacaaatccgcaggcgatgcggagcgcgatcaaattttcgcgctgaatatctcggtgccgctaagtcaatggctgcaacacggtgatgaggtcacgcgccatcacaatgtttacgctacctttagcaccagtacggacaaacagcataacgttacgcagaatgcgggccttagcggcacactgctggacgaaaacaatcttagttacaacatacagcaaggttatcagaatcacggtattggcgaaagcggcgccgctagcctggaatacgatggcgcgaaaggcaacgccaatattggctataacgttagcgataacggcgattaccagcaggtgaattatggcctgagtggcggcctggtggcgcacgcgcatggagtgacgctaagccagccgttaggcaataccaatattttgattgccgcgccgggcgcagccaatgtcggcgttgtcgaccagccgggtattcatacggacgcgcgtggctatgcggtggtgccgtatgcgacaacatatcgccaaaaccgtatggcgctggacgttaacgccatggcggatgatgtcgatattgatgacgcggtgactcgcgttgtgccgaccgaaggcgcgctggttctggcccgctttaaagcgcgggtcggcgcgcgtgccctggtaacgctgaatcataacggtaagcctgtaccctttggcgcaacggtgacggtgaatgatcgccatgcggaggcgattgttgacgaggccggggaggtctatctttccgggttgtcagcgcaaggcgttctgcacgttcgctgggggaacctaccggatcaacagtgcgtcgcgtcctatcatctctcttcctcccgtcagattctgagtcgacaacatgcggagtgtcattaaatgaaaatacctcttttatttgctctgctggcgggaagtgtcgtatcgcagtacgccttcgcagacgtgtgtaaaaacgttaacggcgtgccttccagtattaattacgatttaacgaccactctgacggcagaacaaaaccaggtgggaaagacggttcaactggaaaaaagccaggaagttaatgtacaggcggtgtgtcccgccggcgcgtcgacctatagccagacttatcgctcctatgtgtcgccatatccggtcgtagaaacgagcggtaactggaaatatttaaagctggacccggactaccttgaaggcggaatgcgaattgaggattcttcggcgggcgatatctatccgccaatgaacaatgtcctgatgggatatgatgaaaatgtgaaagcgggtcaaccgttttacgttcgtgactcaaatctggagtttcagctcaaaattgttaaaccgttcgtcggcacggtgaatattagtcctaagactatgtttaatgtttatgtcatgaccgccgcaggcgatccgctgacagatgtcgtgtacagcattctttatagtggaacggtgaccgtaccgcaaagctgtgaaatcaacgccggacaaacgattctggtaaatttcggcgcattatacagcggcaatttcaaccatgcaggccaaaagccggagggggtacgagcgaaaaaattcagcgtaccggtaaagtgcagcggtctggattcgcaggtcaatttaacaatgcgtcttatcgctacgccggatagccacgttccccaggctatcgcttcggataatgccgatgtcggcgtagtggtcgaaaccgatgaaggaaacgcgcttatccccaatgatgtacagagcgtcgcgccttttatcaccgatagcgccggacgcgctaacatcacattgcaggcctacccggtaagtacaacaggcgaaacgcctgcggaaggggcatttaccgcactggccagcctgcgagtggactttgactaaatgaacagatcacactgcgctctttttgccatgggactgatgctgtgtccacaaatcaatgccagcgctgacgacctcgcttataacctcgaatttaccggcactattgtggcgcaaacctgcgacatagatatttccagtctcagtcaaagtattgatttagggcagtttgcagttggcgatttcccctcgacgggaacaacgacaaaatttaagccctttaatatcaacctcaaaaattgttcccgaggaattaccggggcgaagatctggtttaccggcgaacccgatccggacaatcccgcgctactggcgataaccgacaccgggatgggaagcggaaacatgttagcaagcggggttggggtggaaattctgaatgatgatcaggataccatcagtatcaataatgccgactcggtggtctatccgttgaaagccggacgcaacacgctgtctttttatattcgctataaatcgacccggccgacggtcacgtccgggaacgcgacggcggtcatgtatttcgatatgcagtatgaatgaggagccatcgtaattatgcgtaacgatatcctgtacggcatcgggatgctgctggcggcatccggcgtccaggcgcacgatggccgggtctatgtttccggaaccatcacggacaatacgtgttcgctctctcctggctcggaaaatattaacgtggcgatgggcgcggtttctcaacggcagttttatcgcgcaggcgacggttccgcatggcaaccttttgctatcgatttacaaaactgcggcagcactgccagcggcgtaacggtcagttttagcggtgcggcggacagccgtaatacggatttattggcgcttaccgcaggggaaagcgacgcttcaggcattgggattgcgctttatgatcaaaataaaactttaatcccactggggcaagagagtgatgtggtgacgctcagtccgggtcaggcgtcggcgcatctgcaattttacgcgcgttatcttgccgatggcggcgcggtaacgcccggggacgccaatgcctccgcaaccttcattcttgcctatgaataagttctttttacgctgcgcgatatattggtgcttgcttcccatatcatgggcgcaggctggcgtggtaattggcggtactcgctttatctatcatgcgggcgccccggcattaagcgtaccggtaagtaaccgttcagaagcgtcctggttaattgatacgcatattttacctggtggccgctggccaggaaccaaaaacgaagggaatatcatgcccttcgtggtcacgccgccattatttatgctttcagcgcgccaggaaaactcaatgcgggtggtttataccggcgcaccgctacccgccgacagggaaagtctgtttaccttgagtatcgccgctattccctccggtaaaccggaagcgaaccgtgtacaaatggcgtttcgttcggctttaaaattgctctatcgccctgatggactcgccggcaatccgcagcaggcctaccggcatctgatctggtcgcttacccccgatggcgcgacggtacgcaatcctacaccctattacgttacgctctttttattacgtgctaacgagcgcgcccaggacaacgccggggtcgtggctccctttgcaacgcgtcaaacggactggtgccggcacacggttcgctgcactgtgcgctggcaaagtattaatgactatgggcgggtaatgccagcgcaaaccgtggatctgacgcgtattcattaacctatttttcaggcgtctcccgatagcgggaggctttccgaacttatcgaacgagacttttattatgtattatcacgcgttaaaactttcccgactggcgatgttgacgttggcaggcgttgccgtatccgcctcggcaatcgccgccgattctgccccgacgtcgcaaattggtccgacggcggaagcctacatcgtcagtcatccggataaagtgggagaggtcgtggcaacgtatttggccgaacatccggaatttttggtcgccgccagcgagacgttgcatcagcgtcagcagattgcgcaacaacaggcgtatgttcaactggcattacagtatcgtgctgagttgctcagtagcagcagtccttccgttgggcccaacgaggcaaaagcggcggtggtgatgttctttgattaccagtgctcgtggtgcagcaaaatggcgcctgtggtcgaaaacctgattaaggcgaacccggatacccggtttattttcaaagagtttcctattttttcctcccgctggccggtatccggactggcggccagagtcggcgaacaggtatggcttacacagggcggggcgaaatatctcgactggcataatgcgctttatgccacagggaaggtggaaggcgcgttaacggaacacgatgtctacaccctggcgcaacattatctaacgccgacgcagctggccgccgtaaaagaagcgcaaagcagcggtgcagtacatgatgcgctcctcactaaccaggcactggcgcagcatatggactttagcggcacgcctgcttttgtcgtcatgcctcagacgcaagacggtgatgtaaaacgggtgaccgtgatcccgggaagcacgactcaggatatgttgcaaatggcgattcagaaagcgaaggggtgatattcgctcagaggagaacgcacaggagtgaaagtaaaatgaagtctatgcgttgcgtcataccggtgattttactttcctttatcgttcatgaagggacagcgaaaccgaccgctcagattcattttatgggatcggttgttgaggcaggctgctggaatgacgtaggaaccttagaaattcaatgccataataaagagggagttgaacgttatattattgtcgagaatattatcacgccgatatcgtctcctcatgcaacggtaaaacgagattatttggatgaagataagcaattaacagtgctacgcattgtctatgactgaaccgcgtagcagaccgcagatggtgtcccgtcagtgtcgtgtgagaatattatgaaaaatgttctcaccttcccgggacacggtctacagactttatcttcagataaacggcgctaaaaagaaaagcacgaacaataaaaaaagagtgggaataccaatagatataattttattacatcggtgagtatgatattgaatagcttgtggcggtatgtcagcagcgtcaatgataaatctttcatcgatttttatcccctgcctggggagcgtaacgaacagttcgaaaagcccgatttgttgtaaatctcgtcgcagcagataaagaagttgcgtcaaattagcatcgctaacaaattgacttcgctctccccaaactgcgtgtgaaatcatctcccgcgtaatcagtttcttgtaggcattttcaaaaagatagcttaaacaacgcgcacgcattagcgtcacctttagcacttttttatcatgtaatgatattatttctcttaacgactcattataaataaattcgttattaatagtatattgtctcatgaattcactccgttttgatattcataaggtacgtttcacactgtcagtgtgttcactggcggtaaagtactccttacatcagtacggataagcgtagagaaccgcaaagaaataagagaatcatttatgattaaacgggataatattatgcttttttacttttttataaagtgtgccagatatttttgatgttttttataaaatagcatcatgtgtttttattttacacaggctgaaatgatatcaataaaattataatttaataacaaacagatagaggaaatgatttacttattgaaataagtgtggtgcaaggttaatctgcgccttaaatgatggtgccagattataccagccaggataacctatatgcggccaataaaaaatgctaaaaaaattgactacaatctgatcaaagtgttcgatacggttattactgaaggaaatgcaaccagggcggcgaggaaactggatgtcacgcctgcggcgatctctcaggctcttcttcgtttacaaaatctttatggcgaagagttatttatcagaacccgcaaaggattagttccgtccagcaaaggtaaatcgcttcaccaggtatttcgccaggcaattgaatctatagaaagcacactgtgcgataaaacagatgctcaggagagtaatgaactcattgttctgggaggtgatatcactgaaaattactattttccggcattgctggatactgtgttgatgaatcgatatattattaaacactatgcgattaaaaaaacaggggaatactcaccagcctccatgctgacgcatggctatgcggatgtcatcatgggaattctggaaattaagaatgagatgatcgaaagttatcttattgataatttatctgattttgtttgtgtttgtggtgaaaaaagtccattggttgggcttgaaaaaatgtctttatataatttttatgctgccagacatgctgtctatcattcagatatgttctcttctttcaccgctgatagcattgatttattcaagagcagtacgccttatgcggggcgcagggaaataggttattatagtgattcactatttggcgttatcggtattgttgaaaaaagcgatatggttgcgattttgccaggaaagattgctacttattttagagatgtgcggcgttataatataaaaatactacgtatgcctgatgaaatgatttttcgtacgttacccgtttatgcttatctggctacaaacagcacccattataaaaatgtcaaaaaactgatatcaacatttcagtcgacctttctttttagccaggaaaagcagcctgacgctttggttgaaggaagcacatccttatgcgatttgtcggtttaatatcaaattatcgtattaaataaataaccattatgaccatggtcagtaaagcgaaaaataatgccatatatttatactcttctttttttaaagaagaggggaggcagcttttgttttcattgctgataataatgttagcatctactttaatacccgttcgaggcaccgtggaaaaaaactggctcaggccaaagcctttaaggtcgcgccgcagtagatataatatctgggtcaggttggcgtcgctgataaattgacttctttccccccaaagttcattagtgagttgttttttataaataatctcttgttgtgcatgattcagcatatattccagacactttatgcgcattgcggcaatttttatcatctttcccgtttttatgttttttagctcattggtcttatcattgtaagtgtgcgtgctgttaattaaataaatagtcatgatgttatttaatgggtttaattagggtggcgataataatatgcatattaaatttatggatcaactggtgtgattgtaatagcgtcttttttccagagaaaatcgtatcgtgtcacaaaaatgatggttttttagaaaaactaaaattttatttttagtcgctctaaaaataaaatgatagtagtgttaatttttatcagtatattgatatgctttgattgatttattgttgacataaaataatttgaattatggcgcaaggcctatgccaaccataaaaaaggtataggctattggtcacaatgcattaatgctacataattgttatgcttttatagtagcgccagggaaataaaatcttcggacgataaagaatagttttagtctgggtgttattttatggatgttttattttaaattattaaaccgatttctcttgttgacgtagggttatttgctaagcaacgggctggcatgttgtagccgctcgttgcctatatcccaattaatcaggagaaacgtatgaataagaaaagttcgtcaatggttaacatgcccgcaccgcgtgagccgattaaccagaaaatcgataccaataacgcactggttttaaaccataacgccatatatgaacaacgattagcggagatcacgcaatctaatacctgtgacaaggccattgtcaccgtaaatccctacgggaccgccccgttgagtctctatctgggggtttggatggatgaagctgccgcgcttgagatcaatgttgttgatagcgaagcgacgacagaggaagtgcgttatcaatatgatgtacatccgggcgctaaccttattcctgtgtgtgggatggtatccgcggtgaataatcagattaccctacgccttgcctcgcaaattgtcgggcaatatacagtaatgacagacgcattaccgcccacggattcggctaacgtgagcctcggcttccctattattagcgtctcctgtcctgcgcagcaggcctcgctgatggaggaaggactttatttctccacttattttgatcggtataatctggcttttgatcataacgggattgtccggtggtatgtaagtcaggaaatcccttcttataattttgtcagaatggataacggccatttcctggcgacgtcacagggaataaaccattgtctgaatatgtatgaatttgacattatgggacgggtttatacggtttatcttctcgacaatgagttccatcactccattcttcccattgagaacaatctggcgattgcgccttcagaatatagcaatggacggccagacggttactcaaccgggaaagatggcgtttctattattaacttatctaccggacttgaagtcgcctattacgatatgctgtatgtgatggattattccagatcgccgcgtccttccggaagcgcgccaggtcaggacgtatcaatggatgactggctgcatatcaaccaaagctatattaatgaacccaacaatttgctgatctgttccggtcgacatcagagcgcgatttttggcgtaaatgtggattccggcgaactgcgctttattatggcgaaccatgaggattggtctgacgaattcaagcaatacttattaacccctgtcgatgatgatggtgtcccgctgtacgatcttacctcgccgggagggattgatgcggcagataagaatttctggacctgggggcagcataacattgttgaaattccaaacgatgagcctggtatcctggagtttatggtctttgataatggtaactatcgttcacgcgaagatgcgaaaagtctgttgccgctcgataacttcagccgggtggtgcagtttaaaataaacctaaatacgatgaccgtaacgcgtccgtatgagtatggtaaaacggaagtcgggaaccggggctatagcagttttgtgagcgctaagcatttattgactaatggtcacctggttattcacttcggcgcgacgacggttgatgagtttgaacataccattaccgcgcaaccaggttccagcgatcttgtcgatccggatgaagggcaacaggcgttaggtcgactggtattacaagaaatcaataaagagacgaaagaggtcttattcgaagcgatggtgacgtcgggctatttcaagaacgaagagacgaatggcacgaattatcgttatgatatttctgcatttcgggtatacaaaatgccgctgtttgcataactaagtatgttatgcggccggttatcgaccgcataacattatggcttatttgctaatatcatccacgcgcatggtgtggtcaggttgaatattgttaacctgcttcatatagttaaccaacgccggtgcggtttgtatccctatatatttgatatttttacctttagtgaaggtaaatccgccaccacctttaccgataaaggagtccagcgcgacggtatagagtttattgtcttctaccggtttgcctttgatatcaaattcaacaatacgctggcccagcggtttggtgctgtcatatttaaactggacggttttagatacgtgcagcataccgtttttcagatcggcagcgtgtgacatgatggatttcaggtccttaccgctgatttccatgctcatgacatcgttggtgaacggatacatactcagcacatcaccataggtgatattacctttaggcaattcggtacggatgccgccagcattatagaaggaagcgtcggcgccaggaacggtagccatcagggcatcggtgattaagttgccggttggcgcggattcaccgtaagaacgggtcagcacttccggagagtgcgcgaccacctcatcggtaattttcttaaccttgttatcccattcgtcaattttggcctgcgtgaccggatctggcttataagtatccgcatacatggtgatcaacttaccattgtagctgtccacttttttggtttccgggttccagtcaagcaccagtttacctaattcgatggtgtacgcatccgtggaaacgacaagggtatcgcccactttaatcggttctggcgtacctttatgcgcatggccggtaatcaggacgttaagtccatagccttccagcgatttcgccatatcaacgtcggttttcagtgcgcgtgcgacatcagcctcgcctgcgctggactgcatacccggcacgccttcgtgggcgagcagcacggtcaggtcaactttcccttttaactcttccagctgttttttcacataaggaatcggatcgcggcagtcaacgccttcacgcacgcctgcggcaatcgcttcatagaatgcggaaacgccgtgcataccgatgacgccgatcttgaatccatctttttccacgatggtatacggttctttaattaatggcgtatctgtgccgctgtaaaaaacattatccaacaataccgggaattgcaatttgctgagttgtttaaccagattctcatggccatggtcaaattcatggttaccgacagagacggcgtcgtaaggcatggtatttaaaatatcaataatagcctcgcctttggtcagcgtactgataaaaggtccggtgaaatagtcgccagcatcaaagaaaaagacatctttctctttcgcttttgcatctttgacaattttcgagatgggcgcaaagccgcctaccggacgtgtcttggatacataggggataatttctggggttacatgggcatgtaaatcgtttgtataataaattgtgatgtcacgcgcatcggctgaaaaggaaatggctgaagacaaaccaatgcacagcgacagtagggatatcgaaaactttttgttcatataaaccatccatttacgctacattaaagaaaaacaatgcctgtagtcgtgtcattcacgactacaaaccggggaaattaagtaatattcatcaagtttattaattattaaaactcgaagccgatcaggtaattcatacggtcgccgtagccgtcataccccaatttattattgaagtaacggtaagagacggaggcggtccatcgcggcataaatttccatgtaaacgttaccgcgccgttcaggccggtcgtcccaccctgttgttcggcgtaggcatcattacgatccatttcaacttcgttccagtttgaaatgacgaacttttcattaaacatatcgaagttataagccgcgacccaaccgagaacataaccgttaaagcctgtcgcctgtccatactttttagaggtataatcgttcgataagttatgaacagcgaaatagggcttaataaagcctgatgggctggttaaacccagataacctaccccgtacatcatgtttaattcatcaccgaatttattctccatcgacatatagagtttcatcattgcggtaaagttagagccttctactaccctataatgtcccagaaattgggttacatggttacggccttctaccggatggttgagcacgttcatttcataaaatgatgcaaattcgcccctgtcaaacacggcgccgaaatcggctaccgctttccacacttcgccgcgatcgacattgacaaagcctttattccagtcgccatatccgaagctaagtttaccgtatacgcgtttcaattccgctgcctggccattaaagcaagagaaaagaacacatgcggcgagtagactattaatatatttcttatttttcatgctcaactccatgaggtaaaaacacagtgaaatgttgtgtaaagaagcgaattctaaggagtgtctttttatacgtaggtgatagatgtctcaaaaatatcagcgacatataatcgtcaaatattcgtgtcagataatgttgtttattacgtgataactatttgatttatagtttatgtctctgttgtaaaagtcacaccggatagcatgaaattaatgaaacttcgaatgggaataatctctcgcaaagacaacttactgccattaaatgagggtgttaccgttcaaacagcaacatatattgacatcacaatagcggttctgacatatgggccatatttgagatctgcatcactcgttcgcgatttctttttttatagactgcttcaggcgtgttttctttagcacgaaatatatttatggtattaatattataatgagtgtgaataattttctacgataaaacgatgttaatggaagaaatataagacaaatcgaatatatatatagtgcaattaatttaggctgtattccgcagccgggtctatcggcaaatatatcgtaatcagaccgtgcgataactcaaaggagttgaaatgaaaagaacagtcgttgccagtatgatagggttggcgctatgcgctggatgcgtattatcaaccgcgcaagcggcaaccgcaaagcgtcctaacttagtcattattctggcggatgatttagggtatggcgatctcgccacctacgggcaccgcatcgttaaaacacctaacatagacaaattggcgcaggagggggtgaagtttaccgactattatgcgccagcgcctctgtgttctccttcccgcgcgggcctgttaaccggtcgtatgccgttccgtaccggaatccgttcctggataccggaaggcaaagatgttgcgctggggcgtaatgaactgactatcgccaatctgctaaaacagcagggctacgatacggcgatgatggggaaattacacctgaatgcgggcggcgatcgcaccgatcagccgcaggcgaaagacatgggctttgactatacgttggttaatccggcgggatttgtcaccgatgctacgctggataacgccaaggagcgcccgcgctatggcgtggtgcatcctacggggtggattcgtaatggccaacatattggccgcgcagataagatgagcggcgagtttgtgagctctgaagtggtgaactggctggataataagaaagacgataatccgttcttcttatatgtcgcctttaccgaagtccatagcccgctggcgtcgccgaaaaaataccttgatatgtattcgcagtacatgaccgactaccagaagcagcatccggatctgttctacggcgactgggcagacaaaccgtggcgcggcaccggcgaatattacgccaatatcagctacatggatgagcaggtcggtaaagtgctggataaaattaaggcgatgggcgaggaagataacaccatcgtcatctttaccagcgacaacggccctgtcacgcgcgaagcgcgtaaggtatacgagctgaacctggccggggaaaccgacggtctgcgcgggcgtaaagacaacctgtgggaaggtggcattcgcgtaccggcaatcatcaaatacggcaagcacattccacaggggatggtaacggacacgccggtatatggtcttgactggttgccgacgctggccaacatgatggactttaaacttccgaccgatcgtacctacgacggtcagtctttagttccgctcctgaaggacaagactttaaaacgccagaaaccgctgatcttcggtatcgatatgccgttccaggacgatccgacggatgagtgggcgatccgcgacggcgactggaagatgatcatcgatcgccagaataaacctaaatatctctataacctgaaaaccgatcgtttcgagacgctcaatcaaattggtaaacagccgcagattgagaaacagctttacggtaagttcctgaagtataaaaaggatattgataacgattcgctgatgaaagcccgtggcgataagccgacgcctgtcacctggggctaatggaataattataaaaaattaagtatgccacttagggcgatgcccacctgatccggtcactctgtgccggatcaggttcttttatttcagggaaggtaatgatgtttgggaaaagttgtcaggtcatggttaaaccgaccggatcggtgtgtaaccttgactgtaagtactgtttttatctggagaaagaaaagctctatccggatcgaaaaaaccattacaaaatgtcggaagagaccctcgaactcttcatcaggcagcagattgccgcacaggatattgatgaggtcatttttgcgtggcagggcggggaacccacattaatgggcatcccgttttatcgtaaagccgttgagtttcagcagcgctattgtggcggcaaaaccatcgtcaataccttccagaccaacggcatcctgatcaacgatgactgggcgaccttcttccgggagcatgattttctggttggcgtctctattgatggcgatgccgcgttacacgatgaatggcgagtgacgcgctccggaaagccgacgcatgaaaaagtagaaaatgcggtgcgttgtctggcgcagcacgacgtagaatttaataccctcacggtggttaaccgtaccaatatgcatcatcctgttcaggtctatcgctacctgaaaagcattggtagccgctatatgcaatttatccctttagttgaacgctgtggggaaaatgggctggcgcagccgcaggataaacatatcgcgatgacgccgtggtcggtcgatagcctgcaatttggtcagtttctgaatgcggtatttgatatctggatccgtgaggatatcggcgatatcggcatccagctatttgaacagacgctggcggcctggtgcggcctgccgccgcaggtttgcgtttttgctcccacctgcggcagcgcgtttgcgatggaaatgaacggcgatgtttataactgcgatcacttcgtatatccgcaatttaaactggggaatatccaccagaagacgctgcgtcaaatgaatcagggcgaacaaaatcgccagttcggcagcgataaacagcgttcaatggcgcaggagtgtcatcgctgtcaatggaagttcgcctgctatggcggctgtccgaaacatcgttttttaccctctgcgtcaggcgcaaccaatcataactatctgtgtgcaggttatcaggcttttttctcgcataccgcgacggcgatgagtgccatgcgaaccctgtatgaaaaaggcatctcacctgcagaaataaagtcaatatttgtttgaaggtagtattcgcagggagtgaatatgttttctcacattaatgtcgatgcttgcaaaacgccaggctgcaaaaatctggggattctggggagcccagactatctaccgcaagggaaaaatgttctctgtcgagcgtgcggttttttgttccccattatctcagccagatcgcttaatctttttcgccaggcggcgaatcaaccctggaaaggtctggtgaagtcctgtccgcattgtggcgggacgtcgctgaaaaaatatggattttccactaaaggtgaacggcgtatgtattgccgccagtgtaataaaacgttcatctcctataccgctatcaggagcgacgccagacaagagaaccttgccacgttgattggcgaaggagcgtcgctagttgaaatacgcgcggcgctggcgatagacagcacgggttttagccgcgaattacaaaaactgtcccgtcgcgctaatcaagcggaacgcgattttgtgtttcccgcgtttgatatcgctatgagcacgcgggcgtttcgtgtgaaatttaacggcggcgacagcagcttatacgtgctggtgacggcggaagaggagagcggtaaggtcgtcgcgatctcaacgaattactccgcccaaccggtggaagcggattatcaatatcattctgattacgaagaacgacttccgtccggcacgctggcgcatctggtgcagcgaaaagaggcgctgaccatgcgccgcaatgtattatttgatgtggattacggccccgccgttttatataaaaacgatccggggatgttagtaaaacccgtattacctgcttatcgacattttgagttggttcaggcgttgacggatgagcgttccctgaatgtccaacattatctcgatcacgaatgcttcattctgggcggctgtatgatggcgaattttagctatcttcgtcaggggcgctgtcatatttcgtttgtgcgtgaaagaggcgttacgccgcccaaacgcgatctccctccgcggttgtttttgagcggcggaattcgcaacaacgtctggcgtacattttccacacgggattatgcgatggcggtatgcaatctcacaggaaataaaaaggtgagtttgttacgccatgcgacgttaaatagcgcgacggcgtttattcgctatgttcacaaccatcccttcctgccgcatcttaaccggatgtctcctggcaatgttgttgccgtactggattacctaaaatttgaatataacgcttcacgtaactgaattgctaaaataaaaagtgtgatgaggtgttgttgcggtattttattcggacggcttaaaaatccagagtattaattttcgtggtccccatgaggggcgatgagattaatacactggagatttatcatgaatacgttaactacaacgtctgttgtccttcctgcgccgcgtccggcgattaatcagggtatcgatatcaataatgaaatggtgcttaaccataccgctatttatgaaaattgccttgcgcaggtcacgcaagagaatacggtagaaaatgcgctcatgttgttagacccttacggcacggcgcctttaagcgcttatgccggggtctggagtctggaaccggctgagatcatagtcacggtccaggatgcggcaaaaacggcgatgccggtagaacatctttacacccttacggcaggcgcaaatctgttgccggttctggggctggtagcggatactgaaaaccgtattgtcttttctcaggcagatacgccgcttgccgtctatacgctcatcacacagccattaccgccggtagattccgcggaggtcgtattaggttttccgattatcaacgtgacgcaacctgctaccgatgcgaacaagatggcgccagggttttattttattacgcatttcgatcgttataattacgcattagatcagaatggtctggtgcgctggtacgttactcaggattatccgtcttataattttgttcgaattgataatggccatttcctcactacttcagaagcgaaaaatacctatctggatatgtatgagttcgacatgatggggcgtcttcacacattctataatctcgataatcaatttcaccattctatctggccgtgggatagcaataccattgttgcgccctctgaatatacctcgggtcggcccgacgatttgaaaaccaatgaagacggcgtatcggttgtcgatctgactaccggactggagacggcttactacgatatggcgaaggtgctggatacgacgcgggtttcccgtccttcaggtacggcgccgggagaagacccgacggttaaagactggctgcatataaaccagagctacgtgaatgagacgaatcagttgttaattgcgtccgggcgtcatcagagcgcggtgtttggcgtcgatctgcaaacgcaagcgctacgctttattttgtcaacgcatgaagactgggacgacgcttatcagccttatcttttaaccccggtcgacagtgaaggtgtggcgctttatgactttagcaaacaggaggatatcgacgcggccgaccgtgacttttggacttggggccagcataacgtcgttgaaatcgccaataatacgccgggtatagtggagtttatggtatttgataacggtaactaccgttcgcgtgatgacagcaaaagcctgttaccgccggataactacagccgcattgtccatttcgtggtgaatatgaatgagatgaccgttatgcggccatttgaatacggcaaggagctgggcgcgcgtggctacagtagctgcgttagcgcgaaagcgatccagcagaatggcaatattgtggtgcattttgccgactgcacgtttgatgaaaatggccgcgccatctcttgccagcctggcgagagcgatattatcgatccgcaggcgggcagtgaggcgatggggctgctaattttacaggagattgcgcctacggagaaaaccgtgctttttgaagcgaccatgacgtcaggttactacaaaaacgcggaaacgaacggggaaggctatcgctacgatattaccagtttccgggtgtataaaatggatctgtacgcgtagcggtctatcatcaatgactgactgcactaaaaaagtccggcgtaagtcggacttcatttcgtaaaaaacgagctattcatcatatataatctaattttaacgatgagtcaggcgaggtaagatagtagatccgaagaattcacctgattgagagaataaaaagtgaaacatctgcaccgattttttagcagcgatgcctctgggggcatcattctcatcatcgccgctgcgctggctatgctgatggccaatatgggcgcgaccagtggatggtatcatgattttctggagacgccggttcagctacgggttggggcgcttgagatcaacaaaaacatgctgttgtggatcaacgatgcgctgatggccgtgtttttcctgttgattggcctggaagttaagcgcgaactgatgcaaggctcgttagccagtctgcgccaggccgcttttccggtgattgccgccatcggcgggatgattgtaccggcattgctctatctggcctttaactactccgatccggtcactcgcgagggctgggctattcctgccgcgacggatatcgcctttgcgctgggcgtgttggcgctgttgggcagccgggttccgctggcgctgaaaattttcctgatggcgctggcgatcatcgatgatctcggcgccatcgttattatcgcactgttttataccagcgatctttctatcgtctcgctgggcgtggcggcgttcgcgattgccgtgctggcgctgctgaacctgtgcggcgtcagacggactggggtatatattctggtcggggcagtgctgtggacggcggtactgaagtccggcgttcacgcgacgctggcaggcgtcattgtcggtttctttattccgctgaaagaaaaacacggtcgctcgccggcgaagcgtctggagcatgttctgcacccgtgggtcgcgtacctgatcctgccgctcttcgcttttgcgaatgctggcgtttctcttcagggcgtcacgattgacggtctgacctccatgctgccgttgggaattattgccggtctgctgattggtaagccgctggggattagcctgttttgctggctggcgctgcgtttcaagctggcgcatctgccacaggggaccacttatcagcaaatcatggcggtcggcattttgtgtggcattggctttacgatgtccatctttatcgccagcctggcatttggcaatgtcgatccggaacttattaactgggcgaaattgggcattttgattggttcattgctctccgcagtggtggggtatagctggttgcgcgcgcgtttgaacgcgccggcataatcagtacgaaggaaagggggagcgatgtatcgctcccttgcgacattgaacagggagagaaatgagcatgtctcatattaactacaaccatctttattatttctggcatgtctataaagaaggttctgtcgtgggtgccgcagaggcgctttttctgacgccgcaaaccattactggtcaaattaaagccctggaagagcgtttacaggggaagctatttaaacgtaagggacgcggtcttgaacccagcgaactgggcgagctggtttttcgctatgcggacaaaatgtttacgctaagccaggagatgctggatatcgtcaattaccgcaaagaatcaaacctgttgtttgatgtcggcgtcgccgatgctttatccaagcgtctggtcagcagcgttctggatgcggcggtggtggtggacgaacccatacatctgcgttgcttcgagtccacgcacgaaatgttgctcgaacagctcagccagcacaagctggatatgattatctccgactgcccgatagattccacgcagcaggaggggctattctcagtcaaaatcggcgaatgcagcgtcagtttctggtgtacgaatccgtttcctgaaaaagcgttccctgcctgcctggaagagcgacggttgctggtgccgggacggcgctcaatgctggggcgtaagttgttgaactggtttaattcacaggggttgcaggttgagatcctcggtgaatttgatgatgcggccttaatgaaggcgtttggcgcgacgcacgatgcgatttttgtggcgccgagcctttattcgctggatttttatgccgatgagtcggtaatagagattgggcgcgtggagaatgtcatggaagaatatcatgcgatttttgccgagagaatgatccagcatccggcggtgcagcgtatttgcaatgcggactactcggcattgtttaaactacagtagacgtacctaccgtaatacttccggctgcggtattaacccgcagccggaatcattctacaagttcagcaggctacggtactgcccaccttcgcggataaacaccggaattctgttcagtggcgtagcgtactgcagcgtctgccctcctgaatagctttcaccggtcgcaagatccgtccatgtttccccttctggtagccagacatcacgttcgcgcataccttcatgcatgacgggggcgatcagcaggtcaggaccaaaacaatactggtcggtgattgtccaacttgtttcctgttcggggaattcaaagaacagggggcgcatcactggcgtattgtgcttatgggtttcctccatcagcgctttgatatagggcttgagtttttctcgcaacgccaggcaacctgtcagtacctcgcatacttcctcaccgtagctccagacctcgttcggcgcacctgtagggcactgggcgataccatcccgatacggttgtgcgggtaaaatctgcggatcgcggttgccgtgcagacgcatcaccgggctaaagacgccccactggaaccagcgaatcagcaattcatggaatttcgggtcgtgaatattgccaccatgaaaaccgccgatatccgtcgtccaccacggtatccccgcgattcccatattgagtccggcagcaaactggttgcgcagcgatctaaacgaggagtgaatatcccctgaccagaccagagcgccgtacttctgactgccggcccaggcgcagcgtagcaggttgataacctggtcttcgccatcggctttcatgccgtcaaaaaaggttttagcgtacatacgtgggtagatattgcccacttccagtaccggcccggcatggtagcgatagttgtcgtagtcgtaaacgctgaactcaggttcggcttcatctaaccagaataacttcacgcctttatcgtaatagttgcgtttggctttgccccagacgtagtcgcgcgcgcccggatgagtcgcatcaaagtaagtggtattgccgaggaaatccatattgatcggcaagccacgttccgtttgtaccagccagccgttttcgcgcatctcccgatagctttcggtacggttatccaccgtcggccagacggagaccatcagctcaattcccagcgatttcagctcggcaatcatggcatcaggatcgggccagtcgcgcgcatcgaacatccagtcaccctgattcggccagtgaaagaagtcgattacgatcactgagataggcagattgcggcgcttatattcgcgggcgacctccagcagctcttcctgcgtacgataacggagtttgcactgccagaagcccatggcgtagtccggcatcatcggcggtgtgccggtagccagcgcgtaagcccggctaatttctgccggggtatcgccagccgtgatccagtagtccagctgttcgctgacctgcgcttcccattcggtaacgttttgggcaaaggttacgcgtccgactgccgggttgttccataaaaatccgtagcccagactggagagcataaacggtactgaggcctgggagttacgttgcgccagctcaagcacgcatcctttgagatccaggttggcctgttgatactgccccatgccataaattttttccccttcggtggcttcgaagcgggctttcagtgaatatttcccaccctgaatagggcggaactcgcgtccctcaaggttgagtgcgctgacgtactggccgtgagatgattcatcctcgccaatttcgccccgcaggcgccagaactcctgcaacaggggtttgtgtggatggcggtaaaaggtaacctgtcctttttgattgacgatagcgataattttgccgttggtcagcgttgcctggtggtgctcataatcaatgtggcactgactttctgcgactggctcagtcaatgcccagtcttcatttctcattaccggcagatgacggccgctgcgtacgcgcaggctgttctcgccccagggttcaatccataaatagcgatcgttttgctgccagaccagacgacgcgggtcttgttgcataaatggcatggtggtgcctcccatattcgagggtgaaggtaaagaacgttatgagttgacggtttccagatcgtggcgaatcttctcttccatcgcttcgtatttgcgaaagaaaagtagtgggatcgctgcgagcgcgaagagtagggcgggtgcccagataaaggcccagataatgccctccagacccgcagcactctgggcatggttggggacatagccaaaactgttcatgatccaggcggcgaaagcggtgccgaggccactacccatcttgatgcagaaggtactgccgaaggcgataagaatgccggtagccttaataccggtcttccaggcgccaaaatcaacggcgaagcccagcatggcaaatggcattgagcaggcgataccgctgccgatattgccgagtatccaggcggcgatgaggaaagtaatgttgtccgctgccagccacatcatgacgccgccaaacgtggcgaccagcagaccgcctacccatatccaggttttagccaggtatttgctaaagaaggggatagcgatgataaacaggatctgaatcgtcgccaggctgttaatcagcggtaccagatctttacggtcgaggttgtaggtcagataatagacaatggtcgtgttgcgctgctgtagggcaatccagaagatcagattagccagcaccatcaggatccacggccagttacctttcatcgccgcgaaactttttttcatcggcaacttaggttcatgctgtattttatccgtatccatttcacgaatgtttttaaacgcaaagagcgttagcgcgcaggatataatggcaaacgtaattgccgtataaataaaaccagcgtgatcatcaccgttacctaaaaaagcgactaacggcaaggcggtcgcgttcattaataaaaccccaatttgcccaccggtcattcgccaggaatttaaaaccagtctttctttgggagataaggtcatcaggggtaatattgcactgagtggtgtattaagtccggtaaatagaatgctggcaatcatataagatattgctgcatagatggcttttcctgtcatactgatatcaggagaccaaaatgacagcgcgctgaataccgcaaaaggcagcggtaaccataaaaaccagggacgacatttaccgtagcgtgaacgtgttttatcgatgatgatcccccatatgggggcgtctatgccatcgataatacgcgccagcagcaggataacgcctgctacggcaaggctaatgcccgcaacgtctgtgtagaaatataaaatgtacgttgaactgaagcagtacagcagattacccgccacatccaaagagccgtagctaatacgctgtagtaaagacaatgatgctgacccggaaggctgggtatcctcaatgacagaactcataatgataactccgatattggtacgatacgcccagaaaaacaacctctactttctaagcaagttttgaatattatttttatgtcgtttctgaatttaacctcagattaaaatgagtaagtaaggtgtacatgaaaagtagttaacccgacggcatcaatcaattattaaatcttacatcaggattgcgtttattagtttttgaatgagcgatgtttttatttgctaaggtggtcacagttttttcagtaatgaaataagaaaaggaaaacagtgaaagaaaataactttcaagtattacgtgactaagggaggggtagctgaaaaaataggctggtcaggaagagcgtgaacgagtgaggtcagagccagcggttgtcgagcaaaacggcagatagcaggcataaaaaaacccgctttacgcgggtttttctacaaagctgataacaagcaggcgattaagccagtttgttgatctgtgcagtcaggttagctttatgacgtgcagctttgtttttgtggatcagacctttagcagcctgacggtccacgatcggttgcatttcgttaaatgctttcagtgcagcagctttgtcgccagcttcgatagctgcgtatactttcttgatgaaagtacgcatcatagagcgacggcttgcgttgtgcttacgagccttttcagactgaacggcgcgcttcttagctgatttgatattagccaaggtccaactcccaaatgtgttctatatggacaattcaaaggccgaggaatatgcccttttagccttcttttgtcaatggatttgtgcaaataagcgccgtttaaattgcagcactcgttgcgtagtgatggcgcaggattctaccagcttgcgtgctgtgaatacagcctttccatgagaaaaattgcattaagcggcgggttttggggcggagtttgccgcatggcgatgaaaagcatcttctttatgtttcatcagggcaatcgccggttaaccttaaccgctgtacaaggtatactcttgcgattttcactgttttgagtcagacatgaagctgatacgcggcatacataatctcagtcaggccccgcatgggtgtgtgctgaccattggtaatttcgacggcgtacatcgggggcatcgcgctctactgcagggtttgcaggaagaaggacgcagacgcggtctgccggtggtggtcatgattttcgaaccgcagccgctggagctgttcgcgacggataaagcgcccgctcgcctgacgcgcctgcgtgaaaaactgcattaccttgcgcagtgcggcgtggactatgtgctgtgcgtgaaattcgatcgccgctttgccgctttgacggcgcaaacgtttatcagcgaactgctggtggagcgacttggcgtgcaatttcttgccgtcggcgatgatttccgctttggtgctagccgcgcgggcgatttcttgttattacagaaggcgggggcggagtatggttttgcggtttccagcacccaaaccttttgtgaaggcggcgtgcgtatcagtagtaccgcagtgagacaggcgctggcggaagataacctggcgcttgccgaaagtctgctgggacatccctttactatttccgggcgtgtcgttcatggcgacgagctgggacgtaccattggcttcccgacggcgaacttaccgctgcgccgtcaggtctccccggtcaaaggggtctatgcggtggaagtcaccgggcttggcgataagccgttacccggcgtagcgaacattggcactcgtccaacggtggctggcgtgcgtcaacaactggaagtgcatctgctggacgttgtaatggacctctacggtcgccatatagatgtaatactgcgtaaaaagatacgtaatgagcagcgatttgcgtcgcttgatgagctaaaagcgcaaatcgcacgcgatgagttaacggcccgcaagttttttgggctagccgggcaggtgtaaccctgacggtgtttatcaaaccgaaatacggaaccgagaatctgatgagtgactataaatcgaccctgaatttgccggaaacagggttcccgatgcgcggcgacctcgccaagcgtgaaccgggaatgctggcgcgttggaccgatgatgatctgtacggcatcattcgtgcggccaaaaaaggcaaaaaaaccttcattctgcatgatggccctccatatgcgaatggcagcattcatattggtcactcagttaacaagattctgaaagacattatcgtgaagtccaaaggactgtcgggatttgactcgccttacgtgccgggctgggactgtcacggtctgcctatcgagttgaaagtcgagcaggagttcggtaagccgggcgagaaattcactgccgctgaattccgcgccaagtgccgcgaatatgccgctacgcaggttgacggccagcgtaaagacttcattcgtctgggcgtgttgggcgactggtcgcatccgtacctgaccatggacttcaaaaccgaagccaacatcatccgcgcgctgggcagaattatcaaaaacggtcatctgcacaaaggcgctaagccggtgcactggtgcgttgactgccgttccgcgctggcggaagcggaagttgaatattacgacaaaacgtcaccgtctatcgacgtggcgttccgcgccgtcgatcaggatgcggtgaaagcgaagttcggtctgccgggcgtgagcggccctgtgtcgctggttatctggaccaccacgccgtggacactaccggctaaccgcgccatctccctggcgccggactttgattatgcgctggtgcagattgacggccaggcggtgattctggcgaaagatctggttgaaagcgtcatgcagcgtattggcgcggctgaatacaccattctcggcaccgttaaaggcgcggagctggaactgctgcgctttacccatccgtttatgggctttgacgtgccggcgatcctcggcgatcacgtcaccctggacgccggtaccggcgcggtacataccgcccctggccacggcccggatgactatgtgattggtcagaaatacggtctggaaaccgctaacccggttggcccggacggcacttacctgccaggcacatatccaacgcttgacggtgttaacgtcttcaaggcgaacgatatcgttattgaactgctgaaagaaaaaggcgcgctactgcatgtcgaaaaaatgcagcacagctatccgtgctgttggcgtcacaaaacgccgatcattttccgcgcgaccccgcagtggttcgtcagcatggataaagaagggcttcgtcaacagtccctgaaagagatcaaaggcgttcagtggatcccggactggggtcaggcgcgtattgaatcaatggtcgctaaccgtcctgactggtgtatctcacgtcagcgtacctggggcgtaccgatgtcgctgttcgtgcataaagaaacgcaggagctgctgccgattgagcgtactctggcggcgatggaagaggtggcgaaacgcgttgaagttgacggtatccaggcgtggtgggatctcgacccgaaagagatcctcggcgaagatgccgatcaatacgagaaagttccggatacgttggacgtttggtttgattccggttccaccagttactccgtggttgatgcacgtccggaattcgccggtcatgctgccgatatgtatctggaagggtctgaccagcatcgcggctggtttatgtcctccctgatgattagcgtggcgatgaaaggcaaagcgccataccgccaggtactgactcacggcttcaccgtcgatggtcaggggcgcaagatgtccaagtccatcggtaacaccgtgtcgccacaggatgtgatgaataaactgggcgcggatatcctgcgtctgtgggtggcgtctactgactataccggcgaaatggcggtctctgacgaaatcctgaaacgtgctgccgacagctatcgtcgtatccgtaataccgcgcgcttcctgctggcgaacctcaatggcttcaatccggccaccgatatggtcaaaccggaagagatggtggtgctggacaggtgggcggtgggctgcgcgaaaacggcgcagcaagagattctgaaggcatacgaagcttacgacttccatgaagtggtacagcgcctgatgcgcttctgctccgttgaaatgggttcgttctacctcgacatcatcaaagaccgccagtacaccgcgaaggccgatagcgtcgcgcgtcgtagctgccagactgcgctgtatcatatcgcagaagcgctggttcgctggatggcgccgatcatgtccttcacggctgatgaaatctggggctacctgccgggcgagcgtgaaaaatatgtcttcaccggcgaatggtacgacgggttgtttggcctggaagagaatgaagaatttaatgacgcattctgggacgatgtccgctatatcaaggaccaggtcaacaaagagctggaaaatcagaaagccaatggcatcaaatcgaacctggaagcaaaagtgacgctgaaatatgctgacgatgctaacggtacgatcaagaagctgaaactgttgggcgaagaggtcagatttatcttcattacttcccagttcgtgatttctgagcaagcggggggtattgatgatgaaaatattcagtacaatgctggtaatacgacagttcaggcagtggtaacgcgtgccgagggtgataagtgtccgcgctgctggcactacactactgatgtcggcaaggtggcggaacatgcagatatctgcggacgctgtgtcagcaacatcgccggtaatggcgaacaacgtaaatttgcctgatgagtaaaccactctgttcaacaggactacgctggctatggctggtagtagtcgtgctgattatcgatttgggcagcaaatacctgatcctccagaatttcgctctgggggatacggtagggctgttcccgtcgcttaatctgcattatgcgcgtaactacggcgcggcttttagcttcctggcggatagcggcggctggcagcgctggttctttgccgggattgcgatagggatctgcgtaattcttttggtgatgatgtatcgctcgaaagcgacgcagaagctgaataacatcgcttatgcgttaatcatcggcggcgcgctgggtaacctgttcgaccgcctgtggcacggctttgttgtcgatatgatcgatttttacgtcggcaactggcatttcgcgacgttcaaccttgccgatagcgcgatctgtatcggcgcggcgctgatagtactggaaggctttttgccgaagccgacagcgaaagaacaggcataagcgtaaataccgggtggcgcttatccggttttgtaggtctgataagcgcagcgccatcaggcaaacgtggtgccggatggcggtgaaaacgccttatccggcctacggttttatcgtcctttgtgcctccgggcaaaacacgtgagcaatttgcatgtctaaatccgtacagagcaacagcgcgatcctcgttcacttcaccctgaaactggatgatggctcaacggcggaatctacccgcaataacggcaagccagccctgttccgtcttggcgatacctcgctttccgaaggtctggagcagcagcttctggggttgaaagaaggggaaaagaaagcgttttcgctggagcctgacgccgcgtttggcgtccccagtccggacttgatccagtatttctcgcgccgtgagtttatggcggcgggcgaaccggaagtcggggcgattatgctttttaccgcaatggatggcagcgaaatgcctggcgtgattcgcgaaatcaacggcgactcgattaccgttgattttaaccatccgctggccgggcataccgttcactttgatattgaagtgctggaaatcgatccggcgctggaggcataaacatgcagatcctgttggccaacccacgcggtttttgcgccggggtagaccgcgctatcagcattgttgaaaatgcgctcgctatttacggcgcgccaatttacgttcggcacgaagtcgtgcataaccgctatgtagtggacagcctgcgcaagcgcggggcgatctttatagagcaaattagcgaagtgccggatggcgccattctgattttctccgctcatggggtttcccaggcggtgcgtaacgaggcgaaaagccgcgatcttaccgtttttgacgccacctgcccgctggtgacgaaagtccatatggaagtggcgcgcgccagccgtcgcggtgaggaatctattctcatcggccacgccgggcacccggaagtggaaggcaccatgggccagtacagcaacccggaaggggggatgtacctggtggagtcgccagaggacgtctggacgctgaatgtcaaaaatgaaggcaagctctccttcatgacgcaaaccacgctttccgtggacgatacgtccgatgtgattgatgcgctgcgtaaacgctttccgaaaatcgtcggcccgcgcaaagacgatatttgctatgccacaactaatcgtcaggaagcggtgcgggcgcttgcggagcaggctgacgtagtgctggtggtcggctcgaaaaactcttctaactctaaccggctggcggaactggcccaacggatgggaagaaccgcgtttcttatcgacgatgcggcggatatccaggaggcgtgggtgaaagaagccgcctgcgtcggcgtcaccgctggcgcttccgcgccggatattctggtgcagaatgttattgcgcgtctgcgcgagtttggcggcggcgaagctgtcacgcttgaggggcgcgaagaaaatattgttttcgaagtgccgaaagagctgcgtgtggatgttcgtgaggtcgaataagatttcacaattcagaaatctgcctgatgacgctacgttgaccagatcttaagaatttcttttgatattcaatgtgcgacaggaagaataaggcgtagtcgtcatccgttgctaatgccccacctttttgctattcatctgaaaaaccagcacaatcgttgctggttttttggttgtaatgcctacagggataagggaaatgggcaaaataaaatatggattgccaacgttactcgccatcggcttttggatggacgcaacaagcgccacggtgctggagctacctgcctgggagcgaaactataccgggactatcgcggggaaaccggtaaacgttaatatcacgcgatttggtaactctcttaatgggtattactgctatgaaccttgcaatcagcacaaggcagtgattgttctacgcggctcactccaggataaagaggtgcatcttgaagaacgcgtaaaggcgctttcgggttactggaatgcggaaatctccagcagtgagattaaaggcgaatggacgtccgcagataaaaaacgacattttcctgttgcccttatctattacaaacctaaaaactcccctgatattgtgctggtcacgaacacgaatgatgcagggggttacgacccttccaaagagattgattgcggcaatacgccggccatttcggcgataaaattataccgtgatggtaaactcatacagaccttagataccgcctcggtgggcacttgtagcccgtttatgcctcaatggggggatgtcaattttgatggctacccggatctgtcgattgtaacagagttacttgctgggccggatgctccagttcaaacatggctctatgaccccgccaaacagcgttatgttgatgcgccagcgtcttatcaggaaatcacttcaccagagatcgatgctgaacataaacagattgtcagctattggcgcggcggttgctgcagccatggcgtcaatgtgtatcgctggaaaggaaaaacgattgaactgatcgatcgcggtgaaagctactttcagcctgtgatcagtaaaggcaaaatgtataactgctacatgacaccttcctacgctgatgggcgtattatttatccgctagtacgtaaaaatggtcatttgacgccgcctcttagccttgatgggacgtgtcaatctttttggctaaccggtaatgttcgtaccgtgattcaggcagaaaaacccggcgctgagcccgaatcgcttgagattcagtggcaggaaaacaaagcatcgccagggcgtttttgcccattagttccgtttgtcgaaggtgataagctaagtccgcgtctggtgacggatgacgatgtgcctgatgcctgtatcagtcgcgctgagtatgaagatataaaacaataggtcaggagagcattaatgacagcatccctacacattattcttgataccgatccgggcattgatgacgcggctgcgattgccgctgcgctgttcgccccccagcttgatctgcaactaataaccaccgtcgcaggtaatgtttccgttgaaaaaacgacccgtaatgcgttgcagcttctgcatttctggaacagcgatatcccacttgcccagggggccgcgacaccgctgctgcgtccgttacgcgatgcggcatacgtccacggcgaatccggtatggaaggctatgattttgtcgaccatcagcgccaaccgttggcgaagcctgcgtttatcgctatccgggatgtgctgatgaacgccccggagcccatgacattagtggcgattgggccattgaccaatattgcgttgctactgatgcactatccggagtgtgcgtgtaacattcgccgtctggtgttgatgggcggttccgcagggcgcggcaattttacgcctaatgctgaatttaacattgctgtcgatccggaggccgcggcgctggtgttccgcagcggtctggagattgtgatgtgtgggctggacgttacaaatcaggcaatgctctcgccagattttctgaataaactgcccgcgctgaatcgcaccggtaagatgttgcacagcctgttcaaccattatcgcagcggtagtatgcgcactggcgtccggatgcacgatctctgcgctatcgcctggctggtgcgtccggagctttttaccctgcaatcctgttttgtggccgtagaaacgcaggggcaatataccgccggtaccacggtggtggatattgaagggcgtctggggcagcccgccaacgcgcaggtggcgctggcgctggatgtggacggttttcgtcagtgggtggctgaggtgtttgcctatgcgccgtaattacatgttggcgccataatctcatactttgccgcgatagagtctctccggcctgcccactttcccgtagctgatctccgcttcgagaaagttatttttcacgccttgttccagatagcgtcgggcagtggttttactgctgcccagaatttgcgccagagtgtctgctgtatgtactgcctgcgggtcggcgaatatttgtcgtacccggttgaaggtgttttcatcaattccccgcagtccgctattcggttctgcggtttgttctttggcctggatattaaataaggcatcaacgtgcgtctggtttgcctgctcactggaacgtaacgaactgcggtaacgggtgaaccgctccagggtatgctgcaggcgctgataatgtaccggcttaatcaggtaatcgaatacgcccatgcgtaaggcatcgctgatggtatccatatgattgtcggcggtaatgaaaataattcgccccgtgtagttggtgctgatggtatgacgaattaaatcgatccctttgccatcgggtaaaaaattatccaatagaattaactgtggttgatagaggcgtatttgcttcttcgcactttccagtttgtctgcgatgccgacgattgaaaactggggaaaaatcttgatggtgtccaccaggatttccgctagcatcggttcgtcttcaacgatgagtgtcgtaatgctatccatgttattcttctctggtaaaagggatatagagggtaaaaatggtgccaaaaggattattgttatcgacgataatgtcaccattggcctgcttgacgtagctgtgcaccaaccataatccaattccgtgatcgccgttgttgtgggtggtcactccacgctcgaaaatatgctggcggatattttcgtcaataccacatccctgatcggcaacttcaataatgacttcattaccttcgctgttgatcaggcactcaatctgtcgcgagccttcgcgattgagcagggtggcgttataggcgttgtccaataaattgccaacaatcgaaatccattcattatgcgagagcgatgacggcaggtgttcaacaaagcttgaaggatcgaaaatcagctccagccccagctcttttgcccgataatatttaccgattaatagccccgcaaggtggtggtcgcggaaattatgggaaataaaatcgagtactttctggtggctttccgactgctgctgaatcagcgccagcgcattatcgtagcgcttcaggaacagcagtccggcaatggtggaaataaggttgcgatgctcatgctgcacggcgcgcaggttatcggcgtattgccgcacctgacttaactgcaggctgagtgtattgatatcgtctttgttgcgaaagctaataacccagccctgaggctggttgtcaataatgaccgccatgcgactggcgatgactttcatttggttaaaggtgacgatctcatcttttttgtttttttgcggcgcatcgtaaaagaaggcctccggcaacacgacatggtggattgcatagccaatgagttcagactccggttggctcagattcagtaagcggcgagccgtttggttaatggcggtaatacggtgatgggagtcaatggcgatcaacccttcaaataccgactcaaataacacgctttgctgaattaatagttgtgaaagctgctgcggctccatgttaagcatctgctttttaatatgcagcgagaagcggcgggcacagtacaacagtaccagcagcagtaacgccatcgggaacagcaacgagctgatttgtaagttaagccagctctccaactgttccagagtatagccgacggaaacaataccgatgactttaccggtactgtcctgaatcggggatttaccacgtagggaagagcctaatgaacctttgcgcaccgatacgtagcttttagcgttatacagcgcgtcgtcgctatcgccgccctccatatatttgccgatctcatccgggttgacgtgatacagtcgctgacctttttcgttgccaacggtaatgtaagtcgcatccgaaaacgagcgcattgggtcaatcaacgctttgatgcgtgacaaatcatgcgcttctacggcttcaactaattctggcatagcggatatttgcattgcctgaataagcacacgttggcccacctgataatgcaggcgttctttcgtgatatcggtcagataccaggtgattgccagcatcacgatggtggatgtaaacaggatcagtagaaatatccggttttgaaacgagtgtctggcaaaccagcgtgtaatttcccgtataaacatattggtatttaaatatttaattacggtattttcttgcattcggcatcaccggaacctgaaccagttcatacttacttttctttcagaaaaaatttggatgaaaatgggatacgacatgcgtatcccatccactattacatcgccagcacgtatttcagcatcacgcccgcggcaatggccgagccaatcacccccgccacgttcgggcccatcgcgtgcatcagcaggaagttctgcgggtctgattccagccccactttgttcgatacgcgggccgccatcggcaccgccgagacccccgccgaaccgataagcgggttgattttgttcttactgcacaggttcagcagcttcgccatcagcaccccggccgccgtcccgataccaaacgcaatcacccccagcagcagaatgcccagcgtctgcggttgcaggaacttatccgccaccagcttcgcgcccaccgacagcccgaggaaaatggtgacgatattaatcagcccgttctgtaccgtgtcgctcagacgctccaccacgccgctttcgcgcatcaggttgccaaaacagaacatccccagcagcggcgccgcgtccggcagcagcagggccaccagcatgagcagcaccaccgggaagaggattttttcccgcttactcaccgtgcgcagctgcaccatgcggattttccgctccgtctcgctggtcagcgccttcataatcggcggctggattaacggcaccagcgccatatacgagtacgccgccaccgcgatggcccccagcagctccggcgccagcttgcccgacaggtaaatcgccgtcgggccgtccgcgccgccgataatgccgatggccgccgcctgcggcagggtgaagctgataaggccgaagtagttcagcgtcagcgccccgagcaccgtggcgaagataccgaactgcgccgccgcccccagcagcagggtgcgcgggttggccagcagcgggccgaagtcggtcatcgcgccgacgcccatgaagatgaccagcggcgcgacaccggaaccaatcgccactttgtagaacagcgccagtacgccaggcgtgtagcccatgtccaccgccaggttctccatctggccctgcaccgacggtagcgccagcgctaacgcctctttaatggcatgcacgtccggcgcgcagttcagcttcgcggcaatcaccgccagttgcccggcgtcgtggtgcgccagcaggctttccagcgcggtcagcgccatacccgcttccgggatgttggagagcagcccgccgaagccaattggcagcagcagtaacggctcgaacttcttcgcaatcgccagccacagcagcagcaggctcaccagcagcatgatggcctggcctgcgccaaggtgcatcagccccatgccctgaagcagggcgttcagactttccatttcagttctccgttacgccagcgtcatcagggtgtcgccgacggagaccgcgtccccggacttcaccgcgataccgcgtaccgtcccggcctgcgcggcgcggatttcggtttccatcttcatggcttccagaatcagcagcacgtcgccttcggccaccgtctggccctcggtggcaatcaccttccagatattccccgccagcggcgcggtgaccggggtgccggcgcctgccggggcggcagcctgaaccggtgcggaagaggccgccggaacagccgcagtgagctggctgatatcgccgccgtcgctgaccttcaccacaaaggctttgccttccacttccacggtgtagataccggaagctgcaggcttctctgcttttgccaccggctgcgcggcttccgcctgcggcagtggctcaaacgccgccgggttgtggcggttctcaaggaatttgaggccaatctgcgggaacagcgccacggtgagcacgtcgtcaatggcgtttcccgccagagtaatgcccttctcctgcgcctgacgcctgacgtccgcttccagttcagccagctccggtttgagtaaatccgccgggcggcaggtcaccggagcgcccccttccagcacgcgggcctgtaacgcggcgttcaccggcaccggcgtgtggccgtattcgcctttcagaatgccggccgtttctttggcaatggtcttgtagcgttcgcccgtcagcacgttgagcaccgcctgggtgccgacaatctgcgaggtgggggtcaccagcgggataaagccgaggtcctcgcgcacgcgggggatttccgccagcacctggtcgagtttgtccgccgcgttctgctgcttcagctggctttccaggttggtcagcatcccgcccggtacctgcgccaccagaatgcggctgtcgtagcccttcagctggccttcaaaggcgtggtattttttgcgcacctcgcggaagtaggcggcgatattttccagcttcaggatatccagcccggtgtcgtgctcagtacctgccaacgtcgccaccagcgcttcggtggccgggtggccgtaggtggcgctcatggaggaaatcgccgtgtccacgccgtcgacgcccgcctcgatagccttcagcagggccatctccgccatcccggtggtggcgtgacagtgcaggtgcaggcgcacctcaaaacgttttttgatttcgctgaccagctcatacgccgccatcggtgtgagaatgccggacatatccttgatggcaatcgagtcaacgccggtttccagcagttgctccgttaaatccagccaggtctgcagggtgtgcgccgggctggtggtgtaactcagggtcccctgggcgtgcgcgccgtggctgcgcaccgcctgtaatgcggctttcatattgcgcgggtcgttcatggcatcgaagacgcggaacacatccatgccgtttttcactgcccgttcgacgaagcgctccaccacgtcatcggcgtagtggcggtagccgagcaggttctggccgcgcagcaacatctgcagcggggttttgggcatggcttttttgagttcgcgcaggcgcagccacgggtcttcgccgagaaagcggatacaggcgtcaaaggtggcgccgccccagcactccagcgacccgtagcccacgtcatcgagcgcggcggcaatcggcagcatgtcatcaaggcgcaggcgggtggcgaacagagactggtgggcgtcacgcaggacgacgtcggtaatggcaatggtcatggatccctccgggaaattaaacgtggtggcggtgatggtgaatggcggcggcaatcaccggctttaagcgggtgaagtcgtccacgacgggaacggcgcgcggtgcgggcgcggcgacgggttccgggaagaagcgagtaatcacggcagacatgccgcgaatggcaaagatgagcaggaacagaaagctcagtacgaaccccatccctaaaaacatcagggtgaaaccttcacccagtagtacagcttcgttcatgaatcattttccataatgagaggcacgacggtggccttgacgacaaccttcctggtgaatccggctaaggagtagagtggatttcccttggccacctctggctttggcctctacttttctccaggtcgtttgctgccaagacaccgccgtgcgtttttttacaccatcatgctgaacacgatgctagcgataaccagcacaataccgccgcccagacgagaggaaatttgtgcatatgaaatgaggttcatacggttacaggcggagagcacttccagatcgccggagccgccgcggttggccatacaaagacccgcagtaatggatgattcaatcgggtagaagccaatcaaccagcccccgatagctgcgccaacgactgcgccgaccacaatgattgcggcgataactacgttcgcgaacgtcagggcatcgatgatctcttgcagatcggtgtagcaaacacccacacctaccatcagcacccacagtagctgtttggagaagaagtcagaaagacgtttcgccccggctttaatctccggtgagcaaagacctgatgcgttcagcgcagcaacaatcaggaccatccaggcgaagtagtgaatagagacgccgccgatgcttggcagaattttcttggcaacaacataggccagcaggaagcaggtggtggatagcaccatgccaaccgccgtttcacgatgggtaatctgaccggccttttcatcatcttcggttttgaaggaagccttacgaaccaactcgccttcaccgctaagccaggtgtattttttgcctatcatatcgaggagggcggcgaaaataatggcgaagatattcgcaatggtcagaatagcaatagccgttgagtaatactcttcgcgagaacgtccggtaaccgagtgataaatttcagacagaggcacggcgcccgcgccgttaccaccgcccataatcggcagaacgtacagcatcatgatacggtcgaccgggataccgaagcacagaccaatgacgataccgaaaagggacgcgccgacaatcccggcgaggatggttgggatatagcccagcagtgattttaatagcagcttacggtttaccgacaggatcgcgcctgtgatcaacactgcgataaacaggttaaggaagttgcttttatccattacgttgctgatcgcatcaatttctttctgcgtaaatatgccagcatagacaaaataagctgcaaccagaaatatcataaccggtgcgccgccaatatatttattgaagatcggtaaacgtttgccgatttcaccaaaaatggcccccatcacaaacataagggcaaaaccacctactaagtcagtcggtatagcattataaaaatgagaaagtaataaagtaattaatgcaaaggcataaagcggtagcggcataccaaagattttgaatctgagtaaatcgctagccccctttttctccgtcgccgaagcctgggtcatgttggtcataaacattttcctgtgtattgatgggtaacaagacccgcgcatactaataaattcaatgaaccatgagatgtgactatcttcactgaatggttgtgtttttaattaatttaattatttttattaactctggttaattaaggaaataaaaaccataaagcttataaaagcaagggggaaagtgtgatgtctattccagacgagtaatacaaacgctggcgaaatatgcgacgttatttgctgacggatgcagaatagagtgaatctaatatttaaacgcatttatttgcaaaaggatgtattgcgtcgcgagtcggtcgccatgtttctggagggcgtgggactcgccctggaagacgattgtgaaatcgcggtatgcgcatattggcagggtgagatagtcgggtgcggttctctggccgggagcgtactgaaatgcatcgccgtttccccggttttacaaggggaagggctcagcctcaaactgctgaccgagctgcttacattggcctacgagttaaaccgcagcgagcttttcctgttcactaagccgcaaaatcggttgctgttttctggcgcggggttttggcccattgcgcaggcaggtgagctggcggtgttaatggagaacagcagtgaacggttagcgcgcttttgtcgccaactggcgctttatcgtcaaccgggaaaaacgatcggcgccatcgtcatgaacgccaatccgtttacattgggccaccgttatctggtggagcaagcggctgcggcctgtgactggttgcatctgtttgtagtcaaagaagatgcttcatttttttcctataccgaccgttgggcgctgatcgaacaaggaatcgcgggcattgacaacgtcacgttgcattccggctccgcttatatgatctcgcgtgcgacgtttcccggctatttcctcaaagaaaaaggggttgtggacgactgccattgccagatcgatctgcaactcttccgtgaacatctggctccagcgctggggattacccatcgttttgtcggcagtgaaccgttttgtcctctgacctgtgcctataaccagcgaatgcacgacattttgcacgatccgaagcgtagcggcccggttattgaggtcgtcgagctggcgcgggtggagaaaaacggcgcggctatttccgcctctcgcgtcagaaaactgtatagcgaacgtaattggtcggcaataagcgcgctggtgcctgctggcaccctggcatatctgcagcggcatgccgccagacacactgaaaccatatgacgtaacaccgttaacaaggaacataactaatgaaaatcattaaagatgccctggcaggcacgctggaatccagcgatgtgatgatcaggattggtccatccagcgagccaggaattcggctggagctagagagtctggtgaagcagcagtttggcgcggcgattgagcaggtggtgcgcgaaacgctggcgaagctgggcgttgaacgcgcgctggttagcgtcgatgacaaaggcgcgctggagtgcattttacgcgcccgagtgcaggcggcggcgttacgcgctgcagaacaaacggaaattcaatggagtgcgttatgagaccacgtcgcagtatgttgtttatccccggcgcaaatgcggccatgttgagcacctcgtttgtctacggtgcggacgcggtgatattcgacttagaagacgccgtagcgttacgtgagaaagataccgcccgtcttttagtccatcacgcgcttcaacatccgttctatcaggatgttgaaaaagtggtgcgcattaatccactgaacacgccgtttggtctggccgatcttgaagccgtcgtgcgtggtggcgcggatatcgtgcgtctgccgaaaaccgacagcaaaaacgatgtgctggagctggaagcgcaggtcgaacggatcgaacgtgaatgtggacgcgaggtcggcagtaccaggctgatggcggcgatcgaatcagcgaaaggcgtggtcaatgccgtcgacatcgccacctccagcccgcgcatggtggcaattgcgctggcggcatttgattacgtgatggatatgggcaccagccggggcgatggcaccgagctgttctacgcccgctgcgcagtgctgcatgcggcgcgcgttgcgggtattgccgcctatgatgtcgtttggtcggatatcaataatgaagaaggcttcctgaaggaagtgcagttggcgaaagggcttggttttaacggtaagtccttagtgaacccacgtcagattgagctgttacatcaggcttattctccgacacgtaaagaagttgagcatgcgtatgaggtgattgccgccgctgaagaggctgagtctcgcggtctgggcgtcgtttcactcaacggcaaaatgattgacggcccgattatcgaccacgcgcgcaaagtggtggcgctgtcggcttccggtattcgtgattaaggaaggaaccatgaaagagactgtaaccatgctcaaccagcaatatgtcgtaccggaaggattacagccctaccagggggtaacagcgaacagcccgtggcttgccagtgaaacggaaaagcgtcggcgtaaaatttgtgactcgcttgaagaggctatccgtcgttccgggcttaaaaatggcatgacgatatccttccaccatgcgtttcgtggtggcgacaaagtcgtcaatatggtgatggcgaagctggcggaaatgggattccgcgatctgacgcttgcctccagctcattaattgatgcccactggccgcttatcgaacacattaaaaatggcgtggtgcggcagatttacacctccgggctgcgcggcaagttaggggaagagatctccgctggcctgatggaaaacccggtacagatccactctcacggcggccgcgtaaagctgattcagagcggtgagctgaatattgatgtcgctttcctcggcgtgccgtgctgcgatgaatttggtaatgctaacggctttagcggcaagtcacgctgcggctctttggggtatgcgcaggttgatgcgcagtacgctaaatgtgtggtgctcctgactgaagagtgggtcgaattccccaattatccggccagtatcgcgcaggatcaggttgatttgatcgtacaggtggacgaagtaggggatccggaaaaaatcaccgcgggtgcgattcgtctgtccagcaacccgcgtgaactgttgatcgcccggcaggcggccaatgtgatcgaacactcaggttatttttgtgatggtttctcgctgcaaaccggcaccggtggcgcttctctggcggtcacccgtttcctggaagacaaaatgcgtcgccacaacattacggcgagttttggcctgggtgggatcaccggcaccatggtggatctgcatgagaaagggttgatcaaagcgctgctggatacgcaatcattcgatggcgatgcagcccgttcgctggcgcagaacccgcatcatattgaaatttcgaccaatcaatacgctaaccccgcctctaaaggcgcggcatgcgaacgcctgaacgtggtgatgctgagcgcgctggaaattgacgtgaattttaacgttaacgtgatgaccggttcaaacggcgtactgcgtggcgcatcgggcggccatagcgatacggcagcaggggccgatctcaccattattaccgcaccgctggtccgtggccgaatcccatgcgtggtggaaaaagtgctgactaccgtcacgcctggggcaagtgttgatgtgctggttaccgaccatggtattgcggtgaaccccgcgcgtcaggatctgcttgataacctgcgtgctgcgggcgtggcgctgatgaccatcgaacaactgcaacagcgcgctgagcaactgaccggtaaaccgcagccgattgagtttaccgatcgggtggtggctgtggtgcgttatcgcgacggttcagtgattgacgtgattcgccaggttaaaggctgatgaagggcacagacctgttgtacctgggccaggcagttacgctggaggagatgctacaagcgcgcgataaacgtgccgccaggcagcgtcaggcgttgaactgctatcggctaccgttgatttccctcacgctggttgcaccgggcgccgttaaaaactcagcggtctggcggcgtgtcgccgattacgcaattgccgaaatactggcgctttgcgaacagatggagtgggtcaacgtctgggaaatgcaggtaaatgaacgcagcggcccggaatggatggcagcggtctgtgcgccggcaatggcgttgaaacagcacatgtcgacactggagatgagccatccgttagggcggctttgggacatcgacattattgatagcgacggtaagtcgctatcacgccgtgaactcgggcatcctgcccggccatgtttgatatgccagcaggatgctcatctctgtgcccggggcaagcatcacacccttgaccttttgttggatgaaattgcacgaaggattgaatgctatgaacgtgagcgttgtgactgaacggcgtacgccagcgtactcatcgctggcggctggcgaacttaatgggttggttgcaagagcgctgctgacggaagccaggctgacaccaaaacccggtctggtcgatattcgtaattcgggagcgcatagggatatggatctggcggcatttgaacgtagcactaccgccattgctccgtggatggaaaagttttttatcatgggcaacaacacggcggcgctggcggcagaaaatgtcctggtgatgctgcgtccgctggggatggcctgtgagaacgatatgctacaggcgaccaatggtgtgaatacccatcgcggggcgattttcgcttttggcctgctgagcgcagcgattggccgacttctcgcgcggggagaaccgttggagcaaaatcgtatctgcgaccaggttgcccgcctgagtcggaatattgttgcccacgagctctcagcaaaaaaagcgggaaaactgacaaagagtgaaacccatttccagtgttatggcctgtcgggcgcgcggggagaagcggaaagcggttttcgaaccgtcagaacgcaggctttgccggtgtttaaccgggtcgtgcaggagcatgacgatacccatcttgccctactgcaaacattgttgcatctgatggcgtggaatgatgataccaatctggtgtcacggggaggcctggaagggctttactacgtgcagcagcaggcacaaaaattgttgtggcaagggggcgtattggttgaggggggcattgaagcgatgcagtccctcgatgatgaactcatcctgcgtaacttaagccctggcggtagcgcggatttactggcagtgacctggtttttaagtcattttcctgccggttccctctatcctgagtaagtttctcttctttcattctctccagcaatgattcatcctgcgggatgaatcatgtcttttactgatatcgctccctgtttatcattaatttctaattatcggcgattttagatggcggcctccgggcgcgctggttactctgaaaacggtttacgcaatttttacaaaagagaatagctatgcatgaagcacaaatccgcgtcgccattgccggcgccggtggccgcatgggacggcagttaatccaggccgccatggcgatggaaggtgttcagctgggtgccgcgctggagcgcgaaggctcttccttgctgggcagcgatgctggcgaactggcaggggcgggaaagtccggcgtgatcgttcaaagcagccttgaggcggtaaaagatgattttgacgttttcatcgattttacccgtccggaaggcacgttgacgcatctggcgttttgccgccagcatggtaaagggatggtgattggtactaccggctttgacgacgccggtaaacaagccattcgcgaggcgtcacaagagattgcgatcgttttcgccgcaaactttagcgtcggcgttaacgtcatgctcaagctgctggagaaagccgcgaaggtaatgggcgactatagcgatattgaaattattgaagcgcaccaccgccataaagtggatgcaccgtcgggtacggcgctggcaatgggcgaggcaatcgccggggcgctggataaaaatctgaaggactgcgcggtctactcgcgtgaaggttataccggcgagcgcgtagcgggcacgattggctttgcgaccgttcgggcgggcgacatcgtcggcgaacataccgcgatgtttgccgatattggcgagcgcgtagagattacgcataaagcttccagccgcatgacgtttgcaaatggcgcgttgcgatcggcgttatggctaaaaacgaagaaaaatgggctatttgacatgcgggatgtgctggggctggatgtattatagcgactaaataccttcgtgatgtggttgtggtaatcaagattaattgattacaaagggcaatatattattgcccttttgtttttgccccccggttattcggtcagataaataacgcctttcaccattcatgtttcgacagtttcttcgcccacggcatgttctgccgttgttttcgcgttaagaatagtccgtttaaagacatccgggccaacggcatccatttgcgtgacgtaattgccattacgataaatgcggttaattggcccttcagacgcatcggtacgggtcattacgttcaacgggaaaaaattactgcctgaactgacgttagtcatattcagccgcagcgccttaccgtatgcaaaaggcacctcgaccagactgataagactgatatccatcggagggggagtgctgttcctcggggggggcgttttatctcttttgcttcaataggttggcttttttatgctgtagtgaggctggttgtggtccaatcgtatgtgcctgtcttaaagaaaaagaagctggatctttatatcgcgattgtaattcttattacattgtcttaatttgctgttttttgttgattttatgatgcatttgatttgttttttatatttttaatatattgatttttaaaatttttttgtcgttaactttcttgattttgaatttttatgcatttaatggcattgatggctattaagtgagtttttatcgttgttttttgttgttttaatgtcaaatttgaccatttggtccactttttatcatgccagccagttttttgcgaactcaaggaagcgcaagcgttttctatcgtaacttagttgatctttttgcctcttaaacagaataacttccttataatgtgcaaaataacataaaaaacaccctctttaagttgacttttatccggcttaacttcagaatgccgccgtttgccagaaatccacgggtaagcaaatttgcattgcttcatactgactgaatgaattaatatgcaaataaagtgagtgaatattctctggagggtgttttgattaagtcagcgctattggttctggaagacggaacccagtttcacggtcgggccattggggcaacgggttcggcggttggggaagtcgttttcaatacttcaatgaccggttatcaagaaatcctcactgatccttcctattcccgccaaatcgtcactcttacttatccccatattggtaatgtcggcaccaataaagccgatgaagaatcctctcaggttcatgcgcaaggtttagtgattcgcgatctgccgttgattgccagcaacttccgtaacaccgaagacctctcttcttacctcaaacggcataacattgtggcgattgctgatatcgatacccgcaagctgacccgactgctgcgtgagaaaggcgcacagaacggctgcatcattgcaggcgatagcccggatgcgaagctggcgctggaaaaagcgaaagcatttcctggacttaacggtatggatctggcgaaagaagtgaccacggcggaaacttaccgctggacgcagggtagctggacgctgaaagacggtttaccggaagcgaaatctgaggatgacctgccgttccatgtggtggcctatgatttcggcgcgaagcgcaacatcctgcgtatgctggtggatcgcggctgccgcctgacggtggtgccagcgcaaacctctgctgaagaggtgctgaaaatgaatccggacggcatcttcctgtcaaacggccctggcgacccggctccgtgcgactacgcgattactgctatccagaaattcctcgaaaccgacattccgctatttggcatctgcctcggtcatcagctactggcgctggcgagcggtgcgaagaccgttaagatgaagttcggccatcacggcggcaaccatccggtaaaagatatggacagaaacgtggtaatgatcaccgcgcagaaccacggctttgcggtggatgaagactcgctgcccgccaacctgcgcgtgacccacaagtcgctgttcgacggcaccctgcaagggattcaccgtaccgacaaaccggcgttcagcttccagggccacccggaggcgagccccggcccgcacgatgcggcgccgctgttcgaccactttatcgagcttattgagcaataccgtcagtccgcgaaataatcaggagtaataagagccatgccaaaacgtacagatataaaaagcatcctgattctgggcgcgggcccgattgttatcggtcaggcgtgtgagtttgactactccggcgctcaggcgtgtaaagccctgcgcgaagagggctatcgcgtcattctggtgaactccaacccggccaccatcatgaccgacccggaaatggccgatgccacctacatcgagccgattcactgggaagtggtgcgcaaaatcattgaaaaagagcgtccggatgcggtgctgccgaccatgggcggccagaccgcgctgaactgcgcgctggagctggagcggcagggcgtgctggaagagttcggcgtcaccatgattggtgcgaccgccgacgccattgataaagccgaagaccgtcgtcgcttcgatatcgcgatgaagaaaattggtctcgacaccgcgcgttccggtatcgcgcacactatggaagaagcgctggcggttgccgctgacgtgggcttcccgtgcatcatccggcctagctttaccatgggcggcaccggcggcggtatcgcttacaaccgtgaagagttcgaagaaatctgcgaacgcggtctggacctctcgccaaccaacgagctgctgattgatgaatcgctgatcggctggaaagagtacgagatggaagtggtgcgtgataaaaacgacaactgcatcatcgtctgctctatcgaaaacttcgatgcgatgggtatccacaccggtgactccatcaccgtggccccggcacagacgctgaccgacaaagaataccaaatcatgcgtaacgcctcgatggcggtactgcgtgaaatcggcgtcgaaaccggcggttctaacgtccagttcgcagtgaacccgaaaaacggccgtctgatcgttatcgaaatgaacccgcgcgtatcccgctcctcggcgctggcgtcgaaagccaccggtttcccgattgccaaagtggccgccaaactggcggtaggttacacccttgacgaactgatgaacgacatcaccggcgggcgcactccggcctccttcgagccgtccatcgactatgtggttactaaaattccgcgctttaactttgagaaattcgccggtgccaacgaccgtctgaccacccagatgaaatcggtcggagaagtgatggcgattggccgcacgcagcaggaatccctgcaaaaagcgctgcgcggcctggaagtcggcgccaccggttttgacccgaaagtgagcctcgacgacccggaagcgctgaccaaaatccgccgcgagctgaaagacgcgggcgcagatcgtatctggtacatcgccgatgctttccgcgcaggcctctccgtcgatggcgtctttaacctgaccaacatcgaccgctggttcctggtgcaaattgaagagctggtgcgtctggaagagaaagtggctgaagtcgggattactggcctcaacgccgacttcctgcgtcagctcaagcgtaaaggttttgccgatgcgcgtctggcaaaattggcgggcgtgcgcgaggcggaaatccgcaaactgcgcgaccagtatgacctgcacccggtctacaagcgtgtggatacctgcgcggcggaattcgccaccgacaccgcctatatgtactccacttatgaagatgagtgcgaagcgaacccgtccattgaccgcgataaaatcatggtcctcggcggcggcccgaaccgtatcggccagggtatcgaatttgactactgctgcgtacacgcctcgctggcgctgcgcgaagacggttacgagaccattatggtcaactgtaacccggaaaccgtctccaccgactacgacacttccgaccgtctgtacttcgagccggtcacgctggaagacgtgctggaaatcgtgcgcatcgagaagccgaaaggcgttatcgtgcagtacggcggccagacgccgctgaagctggcgcgcgcgctggaagcggcaggtgtgccggtaatcggcaccagcccggacgccatcgaccgcgcggaagaccgcgagcgcttccagcacgcggttgaccgtctgaagctgaagcaaccggccaacgccaccgtcaccgccattgaacaggctgtcgaaaaagcgaaagagatcggctacccgctggtggtacgtccttcttacgtgctgggcggtcgggcgatggaaattgtctatgacgaagccgacctgcgtcgctacttccagacggcggtcagcgtctctaacgatgcgccggtgctgctggaccgcttccttgatgacgcggttgaagtggacgtggacgctatctgcgacggcgaaatggtgctgattggcggcattatggagcacattgagcaggcgggcgtacactccggcgactccgcctgttccctgccggcctacacgctgagccaggaaattcaggacgtgatgcgccagcaggtgcagaagctggccttcgagttgcaggtgcgcggcctgatgaacgtgcagtttgcggtcaaggacaacgaagtctacctgattgaagtcaacccgcgtgcggcgcgtaccgtaccgttcgtctccaaagccaccggcgttccgctggcgaaagtggcggcgcgcgtgatggccggcaaatcgctgaccgagcagggcgtgacccaagaaattatcccgccgtactactcggtgaaagaagtggtgctgccgttcaacaaattccccggcgttgacccgctgttagggccagaaatgcgctccaccggggaagtgatgggcgtgggccgtaccttcgcggaagcgttcgctaaggcgcagctgggcagtaactccaccatgaagaaacagggccgtgcgctgctctccgtccgcgaaggcgacaaagagcgcgtggtggatctcgccgccaagctgctgaaacagggctttgagctggatgccacccacggtacggcgattgtgctgggcgaagccggtatcaacccgcgtctggtgaacaaggtgcacgaaggtcgtccgcacattcaggaccgtatcaagaatggcgaatatacctatattatcaacaccaccgcaggtcgccgcgcgattgaagactccagggtgattcgccgcagcgcgctgcagtataaagtgcattatgacaccacgctgaacggcggttttgccacgacgatggcgctcaatgccgatgccaccgagaaggtaacctcggtgcaggaaatgcacgcgcagatcaaaaagtcgtaaacaaagggtccggcggatattgctctaaccggacctgtaatataatgttgaaagggtttctgtaaagaaaccctttttttgtctatggaaaacccccagctaggctgggggttccggaaagctttcagctttaagccagttattaaaaccccttttgatttgttaaaacatcttgcggtctggcaactgcaaaagttcaacaagaaatcaaaagggggtcccaatgggggacgaaaagagcttagcgcacacccgatggaactgtaaatatcacatagttttcgcgcccaaataccgaagacaagcgttctatggagagaagcgtagggcagtaggcagcatattaagaaaattgtgtgaatggaaaaacgtacgaattctggaagcagaatgttgtgcagatcatattcacatgcttctggagatcccgccgaagatgagtgtgtcgagtttcatgggatatctgaagggtaaaagtagtctgatgctttacgagcagtttggggatctaaaattcaaatacaggaacagggagttctggtgcagagggtactatgtcgatacggtgggtaagaacacggcgaagatacaggactacataaagcaccagcttgaagaggataaaatgggtgagcaattatcgatcccgtatccgggcagcccgtttacgggccgtaagtaacgaagtttgatgcaaatgtcagatcgtatgcgcctgttagggcgcggctggtaagagagccttataggcgcatctgaaaaacctccggctatgccggaggatatttattatcttgcgtaaggtcattcctggagaagtccgtttccgtaaccacattttcaatgtaataagcacgatattgctcacactaatcaatatttaagtcgcatactatcttgcatatccacaattttaatatggcttagtttttattagtttggacaggccgtagccagatttttaatttgtgaaatggtgtgcttatgtgtgaaaaatatgttgaaagaccgctttatttgttaattgctgactggatgatggcagagaaccgatggatcactgccagggagatttcccgtcaatttgatattgaacattgcaaagcaattaatacgctctcctatattctgtcagaagtgggggaaattgtttgtgaagtgaagatgatccctaaccaaattgcaggacgaggctgccagtgccagcgtctggtgaaagtcgtgagtatcgactctcaactctatcgccgattgaatcataatttgcaggaaagaaaagtgagcgtggcgaaagcgccgcggctgtctgccgttccccccacagagctaaaccgtgagcagaaatggcagatgatgctctccaagagtatgcgtcgctaattgtctgtttacctgctggcggggtaaacggtaattgacgcgtaggccggataagcgtgagcgcatccggcatcaattactgtgctgattttggcttcacgtccgtcgtgcctttcaggcgcggtcggttttcttcggcctgcgttaacggcttcgtttcagataaccccgttcgacaacggatcgcaagatcctgatattctttggtattgaggtgtttccagtgcagctcctggtccgtaacctggcgtagtacgcgcgccggtgatcccaccaggagttgccttgcctcaccctgaaatccggctttgacaaaactcatggcggcgacaatgctctcttcgccaatcactgcgccgtccataatgacgctattcatgccgaccagggcgtcccgtcccaccacgcagccatgtaaaatagcgccgtggccgatatggccgttttcatgcacgatggtatcggtatcgcagtagccatgcataatgcagccatcctgcagattagagcctgcctccaggatcaggcgaccataatccccacgcaatgacgcgagtgggccaatataaacaccggcgcccacgatgacatcgccaatcagcacggcgctggggtggacaaacgcgtccggatgcaccaccgggatcagtccttcaaaggcgtaatagctcatagttgtacctcggttttttgccggatggcggcgtaaacaccttatccggtctacggttgcgcatgtgctgtaggccggataagcgaagcgccatccggcatagtcacattaacgacctttccacaccggatcgcgtttttcggcaaatgcctgcggtccttcgagcgcatcttctgaatgcagcaccgacggataatgcttcagtacgccgctgcggatgtagcggtagccttcttctaccggcatttcgctggtcgcgcgataaatctctttcagcgccgcgatagccagcggggcgctattgaccagttgttgcgccagttcgcgcgcactctccatcagttcgctctggctgacaacgcggttcacgactccccaacgcagcgcttcttcggcgctcattcgtctgccggtcattaccatttcgttgacgatagccggtggcagcagcttaggcagacgcaatacgccgccgctgtcaggcacgatgccgagcttggcttccggcagcgcgaagctggcgttttcggcgcagacaataaagtccgccgccagcgccagctcaaaaccgccgccaaacgcgtagccgttcaccgcggcgataaccggcttatcgaggtcaaatatttcggttaaaccggcaaagccgccgggaccaaaatcggcatccggcgcttcaccttccgctgccgcttttaagtcccagccagcagaaaagaatttctccccgccgccggtaatgattgctacgcgtaattccggatcgtcacggaaattaagaaaagcttcacccattgcaaagctggttttggcgtcaatggcattcgctttaggtcggtcgagggtaatttccaggatcgggccgttacgggtcagatgtaatgactcactcatagttcatctccagataaatagttttccggcgggagggattcctgccggaaggtttatttcagattttttttgattatttttcctgaacagttgcgcggcaggtcggttctgatctccataaaagagggaaccttgaacttcgccatattgttttcgcagaagctgaaaaactcggcttcgcttaatgtttcaccttcattaaggacaataaacgctttaatggcttcatcacggatcgcgtctttaataccaaccaccacaatgtcctgaattttcggatgcgcagaaataatattttccagctcgacgcaggagacattttctccgccgcgtttaatcatgttgcagcgcctgtcgacgaaataaaaatagccatcctcatcctgatagcccgaatcaccggtatgtaaccagccctcaggttccagcgctttggcggtagcctccggctgcatgtaatactctttgaagatagtcttgccggggatgcctttaatacagatttcgccaatttctccggcgggcagcgggcgattttgatcgtcgcgaatttcagcttcatagctaaaacccacgcgaccaatggaaggccagcgccgtttgtctccgggacggtcgccaataattccgacaatggtttcagtcataccataagaggtcagcagcctgacgccaaagcgttcggtaaaatcgtctttttcctgctcggataaattgagatagaacatcacttcgcgcaggtgatgctgcctgtccgttggtgcggcgggctggaccatcagcgtgcggatcatcatcgggatgcactcggtcaccgttgcctgatatttacgtacctgatcccagaaggccctggcgctgtacttctctagcagcacaaaggtgctgccggcggaaaaggctggcattgcggcggtacactgacagtcgatatgaaaagcgggcatcaccgtcatgtacacgtcatcatcgcgcagggcgatttgccaggcagagtagtagcctgcaaaacgcaggttgtagtgggtaattaccacccctttaggccgtgaggtggtgcctgaggtaaacagaatttccgccgtatcgtcagtggataacacgggcgtatagcacagcgtggccgactggcgtgcttgtagttgggtaaagtggctcacgccgtcgtcagccggaagctgctcgccaatcagacagatatgattaagcggagtgctattgtcctggcgtatttcacggtacataggataaaactgggcgctggtaaccagcagactcacctggctgttttgcaggatccaggcgctttcttcgcccagtaagcgggcattaatcggcaccataatggcgccgatttttgccagtccaaaccagcaaaagatgaattccggacagttatccagatgcagcgcgaccctatcacccttgcggatccctaaggaataaaaaaggttcgccgtgcggttaatctcttcattgagcgaagcatagctaaactgccgaacgattccctcacaggattcgaaaattaacgccgttttatctccgtacaccccggccaggtcgtcccacatctgacgtaagttttgtccgccaacgatatccatattgctttatccactgaaatcaggcgtgagcgctaaccggaaaaccgattagcgcatcgcgtttaatcctcaactttggccaggcctttgccgaccagttccttaatatctgcttcgctataaccaatgtttttcagaatggcggcggtatccatgccgtgtgacggcatgccacgccagattttccccgggttgtttttaaatttcggcatgatgttcggccctttacaggtgcgaccgtccattgtttgccactgagtaatcgattcgcgggcaacgtactgcgggttaccttccagttccggaatggtgagcaccttcgcacaggcgatattcagttcagcaaaacgcgcctgaacgtcggcgatggtgtgtgttgccagccaggcgtccagtttctcttcgacgagcgggccgtaagggcattccacgcgatggatgagttgtgtgccttccggaacttccggcgtaccgagaatgtgggccaggccaatatctttaaaacactcgttgatttgcgtgatgccgaccaactccatgacgatgtaaccatcggcgcatttatacaggccgcaaccagcgtagtaggggtctttccctttcgtcatacgtggacagatttcgccgccgttgaagtagtccatcatgaaatactgacccatgcgcagcatcacttcgtacatggcgatatcgatgctttcacctttacccgtttcgcgtactttgtgcagggctgccagcgcggctgtcgtcgcggtcatcccggagaagtaatcggcggtatacgggaaggctggcatcggctgatcaacgtcgccgttttggatcagataaccactgaatgcctgcgcgatggtgttatacgccggaagattggtgtactcctcggtaccatactgaccgaagccggaaaggtgggcaatgaccagtttcgggttatgttcccacagcacttcatcagtaataccacggcgggcaaaggccgggcctttactggcttcaatgaaaatatcggtggtttccatcagtttcagaaacgcttcccgaccttcatctttgaaaatattcagcgacagggcgtgcaggttgcggcgtgagagctgcgggtagttaggctgtacgcggatggtatcggcccatgcgacgttttcaatccagataacctctgcgccccattcggcgaacatctgtccggcgaatggaccggcgatttcgattcctgaaaaaacaacgcgtaccccagcaagcgggccaaaggttggcattggtaaatgattcatcatttttctcctggcattttttgcggtatgtaggccggataagcacagcgccatccggcatgattgcctgatggcgacgccccgcgtcttatcaggcctacaagggatcgattagcggtattgcttaagtaccgcacgacccaacgtcaggatctgcatttcatcagaaccaccagaaacacggtcaacgcgcaggtcacgccagaaacgcgtgatgcggtggttgcccgcgataccaacacctcccagtacctgcatggcggtgtctaccacttcaaacgcggcgttggcgcagaagtatttgcacattgccgcgtcgccggaggtaatggtgccgttatccgctttccacgcggcttccagcagcatatttttcatggagttcagtttgatcgccatatgcgcaaacttctcctgaatcagctggaaacggccaatagcttcaccaaactgcacgcgctgattcgcgtaacgcgcagcgtcttcaaaagcgcacattgcggtaccgtagttggtcagcgcgacgaggaagcgttcatggtcaaactcttctttcacgcggttgaagccgttaccttcccgaccgaacatgtctttctcgtccagttcaacgtcgtcaaaggtgatttcacagcagctgtccatgcgcagaccgagtttctccagtttgttgaccttgatacctgctttgctcatgtccacaaaccactcggtgtaaaccggtttatccggcgatgcaccgtctctcgccatgaccacgatgtacggggtataggcgctactggtgataaagcacttactgccattgagataaaccttaccatttttgcgcgtataagtggttttcagactaccaacatccgatcccgctcctggttcggtgatagcagagttccacatctgcttaccggtgccccggaacgccatgattttatcaatttgctcctgagtcccttcacgcaggaaagtgttaaaacctcccggcaattggtacaacacgtaagttggcgcgccaagacgtcccagttccatccagacggcggcgacggtaacaaaacccgcttccagaccgccgtgttcttccgggatcagcaggctatcaatacccatatccgccagcgcttttacaaaacgctcagggtagacgctgtcacgatcgcactcggcaaaataagcttcccagttctcactggccatcagttcgcgaataccggcgacaaacagctcctgttcgtcatttaagttgaaatccatctttcagcctcttgatcaattgggttaataagaattacttgtctttccagtgcactttggcgtctttaataaaggacagcgtcaccataatgttgacgaagaacagcggacatcctccggcgataatcgcggtctgaatcggcttcaacccacccagcgccagcagaacgataccgatgatgccgaccagcactgaccagccgatacgcactaacagaggcggctcttcaccatcgcgaacttcgcgacaggtcgacatcgccagggtgtaagagcaggcgttaatcagcgtgacggtggcaataaagcagaggatgaagaagccccacatggtggcggtgctgagcggcaaggcggcccaggtttcgataatggcgcgcgccacgccgtgttgctcaatcagttgcggaatgttgaggatgcttttatccatcagcagcagcgtgttactgcccagcactgtccacaggatccaggtagacgcggtcagacccatcaccatcccgaagcacagctcacgtacggtacgaccacgggaaatacgggccaggaagatactcatctggatggcgtaaataacccaccacgcccagtagaaaacggtccagccctgcgggaagccgcctttaccgatggcgtcggtatagaacagcatccgtggcaggtgcattaacagcatcccgacggagtcggtgaagtagttcatgatgaagctggcgccgctgacgataaacacccagccgagcatcaggaagctcaggtagctacgcacatcgctggcgattctgacccctttttgcaggccgcaggccacgcaaatcgcgttcagaatgatccagcaggtaatgatgatggcgtcgagttgcagcgtatgcggaataccgaacagccattgcatacactcggtgaccagcggggtagccagaccgaggctggtgcccatcgcgaagatcagcgccaccaggtagaagttatcgacgatggtaccgaacaaccctttcgcatgcttttcaccgacgagcggtaccagcgtggagctggggcggatgacatccatcttgcgtacaaagaagaagtaggcgaaggccacggaaaggaagctataggttgcccacggcagcggcccccagtggaacaggctgtacgccaggcctatctctttcgcgcccgtggaatttggttccaggccgaacggcggggtggagatatagtagtagatctcaatagagccccagaacagaaccgcagcggatgtacaggaggcgaacatcatgaaaatccagctggcggtgctaaactccggtttttcgtcacctaatctctttttggcataggggccaaaaaccagccagaaccagccgaagagcatgacgaccatataccattcaaatgcccaaccccagacgttggtgacataactgaataccgcattaataacgacgttagcggcatcaagatctctgactgttagccagcaaagtatcccgacaattattaatggcggaaaaaaaaccttcggttcaattcccgattttttcttttcatttttcataagtgaattccagtgtgaaaacgaaatttatttagcgtgccagtccatgaacgtttgtttatttattattaatgatttgttgataagtttttaacctctgggacgcctcaatgagtaactcatgatgggtattcacttcgggtgattctgttatcttcgtcacacttttttgcgttgattattttgtgtctaaattttgatttttgctttatttatcaattgattggttgtggttttttaacttttttaagtatctggcgttcaatattgttgagccagcaaacaatattgaaaattttcatatttggcatatttctttcaatattggtgaggtgcgtaacactattgaaagttacgaatatcaatgtgtgacattttcaatattggtgattaaggttttatttccgaattaaagagcgtgatatctgtatttaacaccgccgatataaatacgtttccttcatgatttctggagatgcaatgaagataattacttgctacaaatgcgtacctgatgagcaggatattgcgattaataatgctgacggaacactcgatttcagcaaagcggatagcaaaatcagccaatatgatctgaatgcaattgaagctgcttgccagttaaaacagcagttgggagacgctcaggttgtcgccatgagcgttggcggcaaagcgctgactaatgcaaaagggcgcaaagatgtcctctctcgtggccctgatgaactgattgtggtcattgacgatcaatttgagcaggcgctgccgcaacacaccgctaccgcgctggccgccgccgcgcaaaaatcaggtttcgatctacttatctgcggcgacggttcttccgatctttatgctcagcaggttggtttgctggtgggcgaagcgctgaacattccggcgattaacggcgtgagtaaaatcctctctcttaccgacagcacattgacagtagaacgcgaactggaagatgaagttgaaacgctgagcatcccgctcccggcggtgatcgcggtttccaccgacattaacaccccacaaatcccttcgatgaaagccattcttggcgcggcgaaaaaaccggttcaggtctggtcgcctgcggatatcgggctgaacagcgtacccgcgtattccgcacaacaggttgccgcaccgaagcagcgcgagcgtcagcgtgtggtgattgaaggtgacggtgaagaacaaatcgccgcgtttgtcgagaatctgcgcaaaatcatttaattatcaggggatgttatgaacaaattttccagtgtctgggtattcagcgataccccttctcgtctgcccgaactgatgagtggcgcgcaggctgtaggtgaaaaagttaacgcgttcgtactgaacgaagcagacagcgcgacagcatgtcatttgggcgcggatcatgtctggctgctcagcggcaaaccagaagaccgcatgatcgaagactacgctgctgcgatggctgagactattcgtcagcatagcgagggcggcgcggtgctgctgccgaatacgcgtcggggcaagctgttggcggcaaagctgggctatcgcttgtcggctgcggtttccaacgatgccagcgacgtctccctgcaggatggaaaagcggcggttaaacatatggtctacggcggtctggcgataggggcagaaaccatcgcttcgccgtttgccgtgatcacactcagcagcggaacgtttgacgcacaacaaccggatgcttctcgcagcggcgagatgcacaccgtgcagtggcaggctccggccactgccgtgacccgcaccgcaacccaggcgcgtcagagcaacagcgttgacctcgacaaagcgcgtctggtggtcagcgtgggacgcggcatcggcagcaaagagaatatctcgctggccgaagcgctgtgccagacgattggcgccgagctggcctgttcccgcccggtggcggaaaacgagaagtggatggagcacgagcgctacgtcggtatctccaacctgatgctcaaacctgaactgtatctggcggtggggatctccgggcagatccaacacatggtcggcgccaacggcgcgcagacgattttcgccatcaacaaagataaaaacgcgccaatcttccagtatgcagattttggcatcgttggcgatgcgctgaagatcctgcctgcgctgacggctgccttagcgcgataaaccatttcgggcaggatgcgaaggtatcctgccgctgacaggagtacgtatgtccgaagatatctttgatgccatcatcgtgggtgcaggtctggccggttcggttgcggcgctggtgcttgctcgcgaaggtgcacaggtgctggttatcgagcgcggcaattctgctggcgcgaagaatgtcaccggtgggcgcttgtatgcacatagcctggaacgcatcattcccggctttgcggatcaggcccccattgaacgcatgatcacccacgaaaaactcgcctttatgaccgacaacggggcgatgactatcgactactgcaatggtgaagatgcttcagcgtcgcaggtttcctattccgtcttacgcagtaaatttgacgcctggctgatggagcaggccgaagaggcgggggcgcaactgatcaccggtattcgcgtggataacgttgttcagcgtgatggcaaagtcgtgggcgtggaagccgatggcgatattctggaagccaaagtcgtgatcctcgctgacggggtgaattctctgctggctgaaaagctgggcatgaccaagcgtgttgaggcatcgcatgttgctgtcggcgtgaaggaactgatcgaattgccgaagtcggtcattgaagatcgtttccagttacagggcaacgaaggtgccgcctgtctgtttgccggagcgccgaccgatggtctgatgggcggtggcttcctgtatacgaatgaaacaaccctttccctggggctggtctgcggtcttcatcatctgaaagacgcgaaaaaatcggtcccgcaaatgctggaagatttcaaacagcatccggcagttgcgccgctgatcgccggtggcaagctggtggaatatgccgcgcacgttgtacccgaggcgggaatgaatatgcagcctgaactggtgggcgatggcgtactgattgccggggatgctgccggcatgtgtatgaacctcggctttaccatccggggtatggatctcgccatatccgcaggcgaagcggcggcgaagacggtgctttcggcgatgaagcgcgacgattttagcaagcagtcgctgggtgaataccgtcagcatctggacgaaggtccgatgcgcgatatgcgcatgtatcagaaactaccggcttttcttgataatccccgcatgtttaccgcttatcccgaaatggcggtcaatatcgcgcgcgacctgttcaccgtggatggctccgctccggtgcccatgcgtaaaaaaatcctgcgccatgcgaagaaagtgggcttcattaatctgatgaaagatggcctgaaaggagtgaccgtattatgacatctcccgttaatgtggacgtcaaactgggcgtcaataagttcaatgtggatgaagacagcccgcacatcattctcaaaaccgatcctgataaacaggcgctggaggtgctgattaaggcctgtccggcgggactgtataaaaagcaggacgacggcagcgttcgttttgattacgccgggtgcctggagtgcggaacgtgccggatcctcggccttgatacggcgctggaaaaatgggaatacccgcgcgggacgtttggcgtagagttccgctacggctaataagtacgaagttgtgcccccgttggccggataagatgcggtagcgtcgccatccggcaatcatgtggcgccaatgccggatggcggcggaaacgccttatccggcctacagatgcgctttgcccgtgttgaaacaggacatcaccatgcagcagcccaggaactttgatgaccttaaattctcctccattcatcgcagaattatgctgtggggaagcggcggcccgttccttgatggctacgtgctggtgatcattggcgtggcgctggaacaactgacgccgctattgcaccttgatgctgaatggattggcgcgctcggcgcggctacgcttgccggactgtttatcggcacctcgttgtttggctatatttgcgataaagtcgggcggcgtaaaatgttcctgcttgatattatcgctatcggcgttatctccgtggcgaccatgtttgtttccacgccgcttgaattactggtgatgcgcgttttaattggcattgttatcggcgcggattaccctatcgctacttccatgattacggagttttccaacacccgccagcgcgcgttctccatcggttttatcgccgcgatgtggtacgtcggcgcgacctgcgccaacctggtgggctactggctgtatgacatggaaggcggctggcgttggatgcttggcagcgcctttatcccgtgcttaatcattttgattggccgctttgacctgccggaatcgccacgctggctattgcgaaaaggacgggtaaaagagtgcgaacaaatgatgatcaaactgttcggcgaaccggtctgctttgacgatgagctgccgcaggagacccgcttcctgcagctgtttaaccgccgtcatttcccgtttgtactgttcgttgcggctatctggacctgtcaggtgatcccgatgttcgctatctatacctttgggccgcagatcgtcgggttactcggctgggagcaggggcgcaacgcggcgcttggcaatgtggtgattagcctcttttttatgctgggctgtataccggcgatgttctggctaaacagtattggccgtcgccctctgcttattggcagcttcgccatgatgactatcgcgctggcgctgctggggctggtgtcaaatctgggcatcatactggtcgtggtggcgtttgcggtatacgccttcttttccggcggaccgggcatactgcaatggctttatcctaatgaactcttcccgacggatattcgcgcttcggccgtgggggtcatcatgtcattaagccgcatcggaaccattgtctccacctgggcattaccgatttttattactcgttacggtattaataacgtcatgctgattggcgcgttgatttcgttagtcgggcttggcgtatcggtgatgtttgccccggaaacccgcggcttgacgctaacacagaccggaaacatgactttgcgcggaacgccatcggataaccctcgttaagagtgttctgcatttctccctgcttttcgccaataacgctacagttaacagtcacatgctaaaacaactgaaaagcagggagaacaccatgcaaaaacgtcttatgaccgcactgtttaccgcagcaacactattcaccgtcgcaggatgctcttctaaccaggcggttgaaaccacggatggcaaaactattgtcaccgacgggaaacccgaggtcgataacgataccggtatggtgtcttacaaaaacgccgccaccgggaaaaccgaacagattaaccgcgatcagctgaaaaatatgagcgagctggataattaattcaatcttttctggttagccgcgcaataatattttctctttatgcgcatccatttattcccatgcgaataaacggatgcctgaacaggcagggacgccggaaaacgtcgaaatacgttagaccattcgcccgtgttcccgctttccccaccgcgctgtccgcttacatgaggttacactcatcgacatttctctgaacagcggctcaacatttcccggaaaaaaacatatcgcagggcatttatccttatgattaggtataaatgatgaggtataaggaacaggagtctgtaatgaaaccaatacctttttatttgctcgcgctattttctgccgcctccggggctacggagataaacgtctgcaaagacctgatcggaacatggaaaaccacggcagataacccgccttataccatgacaatatcgccgccagtagaaagctgcggggaaaaatgtgtgaaactgaacgtgcagtatgaacttgacgtgactcaccgcaacgcgctttattgccatgaaggacaagagggggtaaaagggcagggacccatggtgatagcatttgaaggggcgtatggtggacacgctattggaacctataaccgacagctgcaattactttgggctggcgtaatatcgaaaaataaaaaggggaaatggataacgaaaatggaaaattactggttcaggcaggtaaaagcgcactaaacatcatcttaaaacagcccgcaaaaccgtcttattcacgaagggcttactgcctgcgcgcgcacattccaacggcttgcctgccccggatgaactgttgataaaaaagagggccagcatccgtttccagacggccctgagtggattgtgacgtaacatggcaccttgctggcgctctcttattatttcatgccagtgccctcgttatggcgcaatcagagctttatttcgtcgcatcgttataaacttcggcaacggcttcaaaattcggaccatgctcacgtgcagcgataatatggtaatattttccgcctttcgcatcggctaattctgacagtttttcgcgtagatcagagggtgaggaaatctgtccgccactctgggacacatttatggtgccgaccttaaccagtttgaagtggctgatttcttgtttagagacctgctctgccgcaagtgtgctgaatgaagcaaccgttgccagtaatgcggcggcaataatgcgttttttcatagttctgttcctgttgcattgatgataaggtttgcgcaatatcagtaatccgtaacgaaattatttatccccttcatacttcaggttgcttatgggttggctacggattactcggcccacccatgggcctcgccctgacgggccgtcgcacgcgacgttcaaatctgctcccggcaaatttgtcgctcacctcagtcacataattatctatgctcccggggactcactcccttgccgcctttaagcaactcgaattattttgggtaataacctcggttgattatctgaaaatagccttatttggtgtgaccgtcttttatcttgttatagtcacctctttatgttgttgtcaatgtaaaataatgcactgccagctaaaaagaaacttaaccccctgtaaataatagtttttatattatttcttttaatggcgtaatttttattgaatcacgcggcaatacgctagttttattcataagcaacataacagaattgagttatgttttaatttcccagagtgatattaccggttgtatgtctatggttgcgcggcctgttactgatagtgtttctttcggggcgattttattgtagcggcatagggtaatcaccgtagctgaagggaaaaggcacgaacacagcactatagagtatgtttaataatgtatttttttatgaagtaatgtctgcagttgtatctctaaaataaaaacaatgaacttttcatctaaataatttttcagtgaattatggttatttattaatatatttctaatttgaaatacaaatcaatttataacacatattcttacccggaaggcattgatacatatccacgcttcctcgtacagtaataaatgaatatgtgataaagttactgactacaggtataataatatgagtaataaaaaaaatctgtccgcagaagagacggatcttacgcgtaggaaactgttaaccagtgccggtattcttgccgcaggcggtatgttatccggcgcggtaaaggctgatgaaaaatgcgccgtcaaggcgaaaccggcgtgggataaaccgtttactggcgaaatcccggaaaaattgccagaaggatataatattctgttagtcgtgaccgaccaggagcgtttttttcctacgtttcctttcccggtacccggcagagagcggctcatgaaaacgggggtgacattctgtaatcatcagaataccagtaatgtctgtacgccttcccgctccgtattgtataccggcttacatatgccccagacaaagatgtttgataatttgggattaccctggatgccttatgaccttgaccccgctcttggaaccacaggtcatatgatgcgggaactgggatactatacggcctataaaggtaagtggcatcttacagaaaaactggagaagcctttgcctgacgaaaaagatgaggatattgatgtcggggatattcctgaaccagaattacataaaattatggaaaaatatggttttgctgactatcacggcatcggcgatattataggccatagtaaaggcggctatttttatgattcaaccaccacggctcagactataaattggttaagatgcaaggggcagcccttgaatgaccaacacaagccctggttcctggccgttaacctcgttaatcctcatgacgtcatgtttattgataccgataaagagggagaaaaggtacagtggcgtggcgagttggatcaggatgataataccctggcgcccacgcagccaccggaaaacgaactttatcaggcaagctggccgaactatccgctgccggcaaacaggcatcaatcattcaatgagcagggaagaccgccggcgcatcttgaataccagacggcgcgcgctgcgctggaagggcagtttcctgatgaagatcgtcgttggcgtaaactgcttgactactatttcaactgtatccgcgattgtgatactcaccttgaccggatattaaatgaacttgatgccctcaagttaactgataaaacgattgttgtatttactgccgatcatggcgaattaggcggaagccatcagatgcacggtaaaggcgcttccgtttataaagaacagatccatgtaccgatgattatttcccacccggcgtaccccggtaataagaaatgtcaggcgttgacctgtcatcttgatatcgcgccgacattagttggactgaccggtttgccggaagaaaaacagcaccaggcgttaggcaaccgcaaaggcgttaattttagcggattgctaaaaaacccggagagcgttgcggttaatgcggtgagaaatgccagcttatattgctatggcatgatcttgtataccgatgcccattatctccaccgcgttattgcgctacaaagagataaacaaaaaacggtggcgcaaatcaagcaggaaatatctcatttgcatcctgatttcagccatcgttcagggacgcgcatgattaacgatggtcgttataagtttgcacgctatttctcgctaagggagcataatacgccggaaacctgggaggatcttattaagtacaacgatcttgaactttacgatcttaaaaatgatcccgatgagaaccataaccttgctgctgataaacagaaatatcaggatctcattcttacgatgaatgaaaaactgaataaaattatcaaagacgaaattggcgtggatgacggcagttttatgccggatgcggcccatgagccgtgggatcttactattgagcaatttaaccgcatggcgaaagattaagagcctggcccattaggctattttattcgtcggcgatctggcatccagcgtgtctggaggttcagatgctgttggcgctgcgcttattgggtctgtatcatcatgtaatggattgatattacagtcattacaggcaaatttagcgcagcgccgcccgacaagaaggccttaaaccgattggtcagcgatttaaggctactatcatcaccgacctttccacaccggatcgcgcttttccgcaaacgcctgcggcccttcgagagcgtcttccggaggcaggacggcgccagctcctggctggcgttaattcaattttttctgattagccgctcaataatattcactattagcctggcgaatttgtcactacactttgtaataaaaaacagatcatcacaggctaatcatgatcctcattatttatgcgcatccgtatccgcatcattctcatgcgaataagcggatgcttgaacaggcagggacgctggaaaacgtcgaaatacgttcgctttatcacctctatcccgatttcaatattgacgttgccgccgagcaggaggcgctgtcgcgcgcgagtcttatcgtctggcagcatccgatgcagtggtacagcgtccctcctttactcaaattatggatggataaagtcctcacccacggctgggcttacggtcatggcggtacggcattgcatggtaaacatctgctgtgggcggtaacgaccggcggtggtgaaaaccactttgctatcggctcccatcccggatttgacgtcctttctcagccgctacaggcgacggcgctctattgcggcctcaaatggctgtcgccgtttgccatgcactgcacgttcatttgcgatgacgacaccttacaggcgcaggcgcgtcagtataaacagcgtttactggcatggcaggaggtgaatcatggatagccatactctactgcaggcgctgatctatcttggttcggcggcgttgattgtgccgattgcggtacgtttgggcttaggatcggtgctggggtatctgattgcgggttgcattatcggtccctgggggctacggctggtgacggacgccgaatctattctgcattttgcggaaatcggcgtcgtgctgatgttgtttgttattggacttgagctggacccgcaacggttatggaagctgcgcgcctcggtatttggcggcggcgcgttacagatgggggtctgcggcggactgattggtctgttctgtatgtttcttggcctgcgttggcaggtggcggaactgattggcatgacgctggcgctttcgtccacggctatcgccatgcaggcaatgaatgagcgtaacctgaccgtttcgcaagtagggcgtagcgcatttgcagtgctcttgttccaggatatcgcggcgatcccgctggtggcgatgattccgctgctggccgccagcggcgcatccaccacgcttggcgcgtttgcgctatcggcgttgaaagtcgcaggcgcgttggcgctggtggtgttgctgggacgctacgttacgcgcccggcgctgcgctttgtcgcgcgttctggtttgcgggaagtgttcagcgccgtggcgctatttctggtgtttggtttcggcctgttgctggaagaggttgggctgtcaatggcgatgggcgcgttcctggcgggcgttctgctggcgagttcggaataccgtcatgcgctggaaagcgatattgaaccctttaaggggttgctgctggggctgttctttattggcgtcggcatgtcgattgatttcggcacgctggtggagaatccgctgcgcattctgctgttgttggccggttttctggcaatcaaaatcgtcatgctgtggctggtcgcgaggccgctgggcgtaccggcaaaacagcgtcgctggtttgccgtcttattaggccagggaagtgagtttgcgtttgtggtttttggcgcggcgcaaatggcggatgtacttgagccggaatgggcaaaagcgctgacgctggcggtcgcgctgtcgatggcggctacgccgatttttctggtgctgctgacgcgcatggagaagaccgcgacgggtgaagcgcgcgaggcggatgaaatcgacgaagagcaaccgcgggttattgtggccgggtttggacgatttggtcagatagccgggcgtttgctgctgtcgagcggggtgaagatggtggtgctcgatcacgaccccgatcatatcgaaacgctgcgtaaattcggcatgaaggttttttatggcgacgcgacgcgtatggatttactggaatctgccggagcggcgaaggcggaggtattgattaacgccattgacgatccgcaaaccaatttgcaactgagtgaactggtgaagtcgcatttcccgcatctgcagattatcgcccgcgcccgtgatgtcgatcattacattcgcctgcgccaggctggtgtggcgatgcccgaacgtgaaaccttcgaaggcgcgctcaaaagcgggcgacaggcgctggaggcgctggggctggggcgttatgaagcccgcgagcgcgcggatctgttccgtcattttaatacccggatggtggaagagatggcgaaaggggaaaacgatccgttatctcgcgccgccgcctataaacgtaccagcgcgatgttgagcgaaattattaccgaggaccgggagcatctgtcgttgattcagcgccacggctggcagggaacggctgagggcaaacattccggggaggtcgccgatgaacccgaggtcaaaccgtcaatctaaagtaaaaaatgtgatgttctgcaaactttactgctaattggctgtttttgaactactgtaatgctggcgctccacatcaaatgagtggcgtcgccagcagaacgaaaaattttcgtgctcatcctcttttcgtcagtcgacgaaagattgcgctttacgtatagtggcggcaattttttttgtatcaggaaataattaatgatcagtctgattgcggcgttagcggtggatcgcgtcatcggtatggaaaacgccatgccgtggaacctgcctgccgatctcgcctggtttaaacgtaacacgttaaataaacctgtcgtcatgggacgtcacacctgggagtccatcggacgccccttaccgggacgtaaaaatattgttatcagcagccagccaggcaccgacgatcgcgtgcagtgggtgaagtctgtcgatgaggcgattgccgcttgcggcgatgcgccggaaattatggtcattggcggcgggcgcgtgtacgagcagttcctgccaaaggcgcagaagctttatctgacgcatattgatgcggaagtcgaaggcgatacccattttccggattatgaaccggatgactgggaatcggtattcagtgagtttcacgatgccgacgcgcagaattctcacagctattgtttcgagattctggagcgtcgttaacgctgtagtgccggatggcggcgaaacgccttatccggcctactcttgagccagatgtcgccagatgtaggcctgataagcgtagcgccatcaggcataaacctatcaggcgttgaccgcttcgccttcgcccatatccatctggcggtttgacggctgcacaaaatactgtttatcttcccagcgtaaacaggtcaactccccgccccagcagcagccggtatccagcgcgtaaataccttccggcgtccctttcccttccagcgacgcccagtgcccgaacgcaatactgtaagcctcgctcaccggccccggaatggcgaaccacggcttcagcggcgcaggggcattttccggcgacgctttgctgtacatatccagttgaccgttaggaaagcagtaacgcatacgggtaaaggcattagtaataaagcgtagccgcgccagaccgcttaactccggcgaccagttattcggcatatcgccatacatcgcgtcgaggaaaaacgggtacgagtcactcgacagcaccgcttcaacatcgcgggcgcactcttttgccgtctgcaaatcccactgcggggtaatacccgcatgcgccatgaccagctttttctcttcatctacctgcaacagcggctgacggcgtaaccaattcaacagctcatcggcgtccggcgcttcaagaagcggggtcagccggtctttaggtttgttgcggctaatcccggcgaatacggccaacaggtgtaaatcgtgattccccagcaccaaacgcacgctattgccaagcgatttgacgtagcgtaacacgtccagcgaaccgggaccgcgggcgaccaaatcgccagtcagccacagagtgtctgtgtctggcgtaaattccacttgctgtaataaggcgatcagttcgtcgtagcaaccgtgaacgtcgccgatgagataagttgccattgttataattttagtgaatgagtgtagggacggcgagtcgaaacacggggatgtcgatggtaaaggcgtcgccattttcatcgatcatttcgtaatgaccctgcatggtgcccagcggcgtttcaattaccgcgccgctggtgtactggtactcttcgccaggcgcaatgcgcggctggacgccaaccacaccttcgccctggacttcggtttcacggccatgaccattggtaatcagccagtagcggcccaatagctgcactggcgcccggcccagattgcggatggttacggtataggcaaaaacgtaacgttcatcgtcaggtgaggattgcgcctcaatgtagacgctttgcacctgaatacacactctgggcgaattgatcatgtttaactctccttcaaaggcgcgttttccgacagatagttggccatctggcagtactgcgcgacagagatattttccgcgcgcattgccgggtcaatacccatttccgtcaacgtctcaacgctaaaaagattgccgagactgttacggatcgttttacggcgctggttaaaggcctcggtggtaatacggctcaacacgcgaatatctttaaccgggtaaggcattgttgcgtgtggaaccagacgcaccacggcggagtccactttgggcggcggcgtgaaggcggatggcggcacttcaagcaccgggatcacctgacagtaatattgcgccatcacgcttaaacgaccatacgctttgctgttcggccctgcaaccagacgatttaccacttctttttgcaacataaagtgcatgtcggcaatggcatcagtatagctaaagagatggaacatcagcggggtggagatattatagggcagattgccgaacacacgcagcggttggcccaactgcgcagacagttcgccaaagttcatggtcatggcgtcctgctgataaatagtcagcttcggccctaaaaacggatgggtttgcaaacgcgccgccagatcgcggtcaagttcaatgaccgtgagcttatccagtcgttcgccgaccggctccgtcagcgccgccagaccggggccgatttcaaccatcgcctggcctttttgcggattaatagcagaaacaatactgtcgatcacaaaccgatcgttgagaaagttttgcccgaagcgtttacgggctaaatggccctgatggactcgattattcattgggtattaacaatcattttgatggcgagattaagcgccgtaataaaactgccgacatccgcttttccacggcccgccagttcaagcgcggtgccgtggtcaacggaggttcgaataaaaggtaggccgagcgtaatattcactccccgaccgaatccctggtattttagcacgggcaggccctgatcgtggtacattgccagcaccgcgtcggcattatcgagatatttgggctgaaacagcgtatcagcaggtagcggcccgttgagtttcatcccctgcgcccgcagctcgtcgagcaccggaatgatggtgtctatctcttccgtgcccatatgaccgccttcgcccgcgtgcggattcaggccacagacaagaatgcgcggttcggcaataccaaatttggtccgcaaatcgtgatgcaaaatagcaatcacttcgtgcaaaagcgcaggggtgatggcgtctgcaatcgcccgtagcggcagatgcgtggtcgccagcgccacgcgaagttcttcggttgccagcatcatcacgacttttttcgcctgcgaacgctcttcgaaaaactcggtatgaccggtaaacgaaatgcctgcgtcgttaataacgcctttgtgcacggggcctgtgatcagcgcggcaaattcaccgttcagacagccatcacacgctcgcgccagcgtctctaccacgtaggggccattttctaccgtcaactgaccggagatggcaggcgcgcgcagcgagaccggcaatagggtcagcgttcccgcgggctgcggcgcagcggggacatcaggcgagtaagggagaagcgagagaggcaggccgagcatggcggcccgctccgtcaggagcgcgccgtccgcacagacgaccagttcaatcggccacgcgcgttgcgccagttggacgacaagatcggggccaatcccggcgggttcgccgggagtgataacaacgcgttgcgcactgctcattagttactcaaaatcttaacgtaagcgctggcgcgctgttcttgcatccaggtcgccgcttcttctgagaatttacggttcatcagcatacgataagcgcgatctttctgcgccgcatcggttttgtctaccttacgcgtatccagcaattcgatcagatgccagccgaaagaggagtgtaccggcgcgcttatttggcctttatgcagcttcgttagcgcgtcgcggaacgccgggtcgaaaatatctggcgtagcccaacccaaatcaccgccctggttagcggagcccgggtcctgagagtactctttcgccgcagcggcaaaggtggttttaccactcttaatgtcagccgcgatttcttccagcttcaggcgcgcctgctgatcgttcatgatcggcgacggcttaagcagaatgtgacgagcgtgaacttcggtcacggagatactctggctctgaccgcgcaggtcatttactttcagaatgtggaagccgacgccggagcgaatcgggccgacaatgtcgcctttcttcgcggtgctcagcgcctgggcgaaaatccccggcagctcctggatacggccccagcccatctgaccgccttttagcgcctgctggtcggcagagtaggtaatcgccagtttgccgaaatctgcgccgttacgcgcttcttcaacaatgctttccgcctggcgctgcgcgtcgttaacctgctcggaggttgggttttccggcagagcaatcaggatatggctcaggttcagctcggtgctggcatcgttttgggtgccaatctgttttgccagcgcgtcaacttcttgcggcaaaacggtgatacggcgacgaacctcattgttgcgcacttcagagataatcatctctttacgaatctggttacggtaggttgaatagttcagcccatcgtaagccagacggctgcgcatctgatccatcgtcatattgttttgtttggcgatgttggcgatggcctgatccaactgctcatccgtgatcttcacccccatcttctgacccatctgcaggataatttgatccataatcaaacgttccaggatctggtgacgcagcgtggcgtcgtccggaagctgctgacctgcctgacccgcgttgagtttgactgattgcattaagccatcaacgtcgctttccagcacgacgccattattgacgacggctgcgactttatcgactacctggggggcagcgaaactggtattcgcgatcatggcgataccgagaagcagcgttttccagttcttcatactttttccatttcaattaaccgcaatgcggattacgttgtaaatcaatcagattacatagagctttggtacggcagaatgttcgaacgcaacatttcttgcgtgccgaggccgtagttagagctcaaaccgcgcagctcaatgttgaagccaatcgcgttatcataaatcgcgtgttgtttatcgttatcccaaccgttcagcttacgttcgtatccgacgcggatcgcatagcagcaagagttgtactgcaagccgagcatctggtctgcaggtttgctcgaattggtatcgaagtagtacgcgccgacaatcgaccagcgatcggcaatcggccaacttgccaccgcgcccacctgattgatgccgtttttatactgctctgccgtggaataatacgaaggcaacgtagcctgaatatattccgggctggcatagcggtagttcaactgtaccagacgatcctgatcccgacggtattcgaggctgctgctgctggtagcgacgctatccagacgggtatcgtactgcactccgctacgcagcccccagcgttctgaaatacgccagtaagtgtcgcctgcccaaaccagcgaaccggttttgtcgtcattctcccatttaatgttgtcatcgccggtgcgagactccgtgaaatagtagatttgaccaacagaaacgttaaaacgttcaacggcggcatcatcataaatgcgtgttgtgacgccggttgtgacctggttggcggaagcaatacggtcgagaccgccataagtgcggtcgcggaacaggccgttatagtcggattgcagcaaagaagaatcgtagttatagatgccgctctggtcgcggtacggcacatacaggtactgcacgcgtggttccagcgtctgggtataccccggcgccagcatcgccatatcgcgttcgaagatgagcttaccgtcgactttaaactgcggcatgacgcggttaaccgaatcttccagcttatttttattgtttggatcgctgttatagctgtccagattcgtttgctgatagtgcgtcgccatcagcttcgcttcggtgttcaggctgccccagcggttggagagcggcaaattgatggttggctccaggtggacgcgggtcgcttccggcatattgtctttggtgttaacaaagtgcaccgcctggccgtaaatccgggtatcaaacgggccgagatcgttatggtagtagttaacgtctaactgcggctccgctgaatagctgctggtgttttgatcgttaaagacctggaattgtttggtcgacaccgtagcgtcaaagttttgtacggcgtagccgacgctgaatttctgcgttgcgtagccgtcggtactggaaccgtacttactgtcgaaatcgttaaagtagctggagtcgctgactttggtgtaatcgacgttaaaacgccacacctgatccatcacgcctgagtgctgccagttgaataaccagcggtgcttatcgccctctttggggtgatcgtcctcgtagactttatcagaaggcagataatctaattccatcactccctcgcctgcctgcgtgagataacggaattcgttctcccacataatattgccgcggcggtgcatatagtgcggggtgatggtggcgtccatattgggcgcgatgttccagtaatacggtaagtagaactcgaaatagttcttggtcgtgtatttcgcgttcgggatcaggaaacctgagcgacgcttgtcaccgacgggtagctgtaaataggggctataaaagatcggaaccggacctactttaaaccgggcgttccagatctccgcaacctgttcttcgcggtcatggatgacttcactccccaccacgctccaggtatcggagccaggcagacaggaggtaaagctgccgttttccagaatggtatagcggttttcgccgcgctgcttcatgagatcggctttaccgcgcccctgacggcccaccatctggtaatcgccttcccagacgttcgtgtctttggtgttcaggttcgcccagcccttcggccctttaaggatgacctgattgtcatcataatgcacattacccagcgcatcgacggtgcgtacaggttccggctgaccttccgcctgcttctgatgaagctgcacttcatccgcttgcaggcggctattcccctgcataatgtccacgttgccggtaaaaacggcatcgtccgggtagttacctttagcgttatcggcattgatagtaaccggcagatcgttggtatcgccttttaccagaggacgatcgtagctcggcacgcccaacatacactgtgaggcgagatcggctgccagcccctgatgactataaagggcgctggcgatcatggtggccagaagagtgggaatacgttttttcatacgttgtatttattgttccatcatcggtagcgttgcgcgtgacaaacggtcacagcctaacttactcatcttcgctgcgccagtgttaatcctgccgtttagcgtctgtggtgttaggcacggcattgaatgacaggtatgataatgcaaattataggcgatgtcccacaattgaccgtagccttcatttgcagaaaagcaccttattttgtgggagatagcctcaccgatagcgtaacgttttggggagtctatgcagtactggggaaagataattggcgtcgccgtagccctgatgatgggcggcggcttttggggcgtggtcctgggtctgctggtgggccatatgttcgacaaagcccgcagccgaaaaatggcgtggtttgccaaccagcgggaacggcaggcgctgttttttgccaccacctttgaggtgatgggccacttaaccaaatcaaaaggacgggtgacggaagcggatattcatatcgccagtcagttgatggatcgtatgaatttacacggcgattcacgtactgccgcgcagaacgcctttcgggtcggaaaagcggataattacccattacgtgaaaagatgcggcagtttcgtagcgtctgcttcgggcgttttgatctgatccggatgtttctggaaattcagatccaggcggcgtttgccgatggctcgctacaccctaatgagcgggaagtgctgtatgtgattgcggaagagttaggtatttcccgcgtacagttcgatcagtttctgcgcatgatgcagggcggcgcgcagtttggcggcggttatcatcaacagtccggcggcggctggcagcaggcgcagcgcggcccgacgctggaagatgcctgtaatgtgctgggggttaaaaccaccgacgatgcaaccaccattaaacgcgcttatcgcaaactgatgagcgagcatcatcctgataagctggtggccaaagggttgccgccggaaatgatggagatggcgaagcaaaaagcgcaggaaattcagaaagcgtatgagctaatcaaagaacagaaaggcttcaagtgattgaattgccggatgcggctagcgccttatccggcctacgttaatgaatgtaggccgggcaagcgaagcgccccggcataaattggctcagaatttaaaaatctgccgggactttaaacgtcatgctgttaccgtaagcgggatgggtaatggtcagcatttcggcgtgtaactgcaaacgcggcgccagcgacaacgcttccggcgaggcgtaaaaccgatcgcctaaaatcgggtggcctaacgccagcatatgcacacgaagctgatgcgaacgtccggtgatcggcttgagcaccacgcgggcggtattatccgccgcaaactccaccacgttatattccgtttgcgccggtttgccggtttcataacacactttctgctttggccggttcggccagtcgcagatgagcggtaagtcaaccagcccttccgccggggagggatgaccccatacgcgcgctacatactgctttttcggctcacgttcgcggaactggcgttttagctcccgctccgcggctttggtcagcgccactacaatcacgccgctggtggccatatccagacgatgcaccgattctgcctgcgggtagtcgcgctggatacgcgtcataatgctgtctttgtgcgcttccagacgccccggcacggacaacaggccgctgggcttattgaccaccataatgtgctcatcctgatacaggataaccagccagggttcctgcggcggattgtagttttccatccccatgtacggctccgttattggtgcgtgacgacgataagacgcagcgcgtccagacgccagcctgcctgattcaggctttccagcacctgctgacggttgctgtcgatagcggcaagttcgtcgtcgcgaatgttcgggttgacggcgcgcagcgcttccagacgcgacagttccccggacagtttttcatccgcctcgcggcgcgcgttatcaatcagcgctctggcggacttttcaatctgcgtctcgcccagttgcaaaatggcgtggacgtcctgttgaacggcgttcaccagtttgctaccggtgtggcgattcacggcgctgagctggcggttgaaggtttcaaactcgacctgggcggccagattgttgccgtttttatctaacagcatacgtaccggcgtcggcggcaggaagcggttcagttgtagctgtttcggcgcctgcgcttccacgacgtaaaccagttcgaccagcagcgtgccgacgggcagcgctttatttttcaacagcgaaatggtgctgctgccggtgtcgccggagaggatcagatccagtccgttacggatgagcggatgttcccaggtaataaactgcgcatcttcgcgagacagggctacgtcacgttcaaacgtgatagtacagccgtcttccggcaggccggggaaatccggcaccaacatgtggtcggacggcgtcagcacgatcaggttgtcgccgcgatcgtcctggttaatgccgacgatatcgaacaggttcatggcgaacgcaatcaggttggtgtcgtcgtcctgttcttcaatgctttgtgcaagctgttgggctttttcaccaccgttggagtggatctccagcaggcggtcgcggccctgttctaactgggcttttagcgcttcatgttgctcgcggcaggatttgatcagatcgtcaaacccgtcggtttcttcaggcgcggccagatagttaatcagactggcgtaggctgaatcataaatcgcgcggccggttggacaggtgtgctcaaaggcgtccagcccttcgtgataccagcgaaccagcaccgactgggcggttttttccaggtacgggacgtggatctggatatcatgcgcctggccgatgcgatccagacgaccaatacgctgttccagcagatccgggttaaacggcaagtcgaacatcaccagattgctggcaaactggaagttacgtccttcggagccgatttcggaacataacagcacctgcgcgccggtatcttcttcggcgaaccaggcggcggcgcggtcgcgttcgataatcgacatgccctcatggaacacggcggcgcggatgccttcgcgttcgcgcagcacctgctccagctgtaacgcggtggtcgctttggcgcagatcaccagcactttttgcgaacgatggctggtcagatagcccattagccactcaacgcgtgggtcgaagttccaccaggtgccggtatcgccttcgaactcctgataaatttgttccggatagagcatatcgcgggcgcgatcttccgggcttttacgcgcgcccataatgccggagaccttaatggcggtctgatactgggtcggcagcggcagttttaccgtatgcagttcacgtttcgggaaccccttgacgccgttacgggtgttgcggaacagaacgcggctggtgccgtggcgatccatcagcatcgacaccagctcatcacgggcggcctgcgcatcgtcgcgatcgctattagcggcctgcaacagcggttcaatatcctgttcgccgatcagatcgcccagcctgttcagttcgtcgttgctgagtttattgcccgccagcagcatggccaccgcatcggcgacaggtcggtagtttttctgttcttcgacaaactgttcgaaatcgtggaaacggttcggatccagcaggcgcagacgggcgaaatggctttccatccccagctgttctggcgtggcggtcagcagcagcacgcccggtacgcgttcagctaactgttcgatggccatatattcacggctcggcgcatcggtactccacaccagatgatgcgcttcgtcgaccaccagcagatcccactcggcgtcgcacaaatgttccagacgctgcttattacggcgggcgaaatccagcgagcagatcaccagttgttcggtttcaaacgggttatacgcgtcgtgctgcgcttcggtatagcgttcgtcatcgaacagcgcgaagcgcaggttgaaacggcgcagcatttctaccagccactggtgttgcagggtttccggaacgatgatcaatacgcgttccgccgcgccggataataactgttgatgcagaatcatcccggcttcaatggttttacctaagcccacttcatccgccagcagtacgcgcggcgcgtggcgacgacctacatcatgagcgatattaagctgatgcgggatcagattggtccgctgaccgcgcagaccgctgtatggcatccggtactgctcgctctgaaatttacgggcgcgatagcgcagcgcgaaccgatccattcgatcgatttgaccggcgaacagacgatcctggggcttactgaaaaccaacttgctgtcgagcagaacttcgcgcaacgtcacattggtctcttcggtatccaggcgggtgccgacataaacaagcaggccattttcttcttttacttcatcgatatgtagctgccagccttcatggcttgtaatcgtatcgccagggttgaacatgacgcgggtcacgggagaatcactgcgcgcatacaggcggttttcccccgtggacgggaaaagtaaggtgacggttcgcgcatccatcgcaacaacggttccaagtcccagctcgctttctgtatcgctgatccagcgttgaccaagtgtaaaaggcatatgtgttcggctctatatctttaattgcaggcattactcgccattcccaggcgacagcactggataattgcgagtatacgaccccgctaccaggctaatgtggtagtggcgttaattaggtccaggaatggaaagggcgctatggtactggaaggcggcgctttcgtcacgcgtcaaaataaccccagttgcccggtcagtagtgtagcaaaattatcttcaacgaagggaagaattccttccgccacgggttgtagctggcgggtaagatagtgttcgtaatccagcggcgactgctggtaatccacgggctcggggccgttaacagtccagacatattttatggcgccgcgattctgatactgcgccggacgaccctgcttcaggttttgttcatccgccagccgggcggcgcgaacgtgcggcggaacgttacgttggtactcatgtaaagggcgacgcagacgcttacgataaaccagctgtgcgtccagttcgcccgccatcagtttatcgatagtctcgcgcacatagtcttgataaggttcattgcgaaaaacacgcagatacagctcctgttgaaagcgctgcgccagcggcgtccagtcggtccgcaccgtttccagacctttaaataccatgcgctggctgtcgccttcctgaatcaggcccgcgtagcgttttttactgccagtatccgcgccgcggatggtcggcatcagaaaacggcaaaagtgggtttcaaactccagctccagcgcgctggtcaaattttgctgttgtaacgtctgcgcccaccattcgttcacgtgacgcaccagcctgtgcccgatttccgccgcatcggcttctgaatgcgcgcgccggagccagacgaaagtggaatcggtatcgccataaatcacgtcataaccctgcgcctcaatcagcgctttggtctggcgcataatcgcatgaccgcgcatggtgattgacgacgccagacggggatcgaaaaagcgacaggccgtggtgccgagtacgccataaaaggcgttcataatgattttaagcgcctgcgagagcggtttattaccctgacgtttggcttcatcgcgcccgtgccagatttggctaacaatttccggcaggcagtgcttttctcgtgaaaaccaggcgtcaaggaaaccttcggtactgtgttccggatccggctgcgccatgccttcgaccagcccgacgggatcaatcaaaaacgtgcggataatcgacgggtacaggcttttataatccagcaccagtactgaatcgtataatccgggttgtgaatccattacgtagccgccgggacttgccagcggcggcacttcgccgagattgggcgcgacatagccggcgcggtgcattcgcggaaagtaaagatgcccgaatgcggcgaccgaaccgccgtggcgatcgaccggcaggccgttgatcgtcgcgcgttccagcaaaaacggcatgatctcggttttatggaaaatgcgcgtgaccagctcgcagtctttcaggttgtaggtggcgagggcgggtttatcctgggcaaagcggcgatcgatctcatccatacgatcccaggggttatcaatggattttccttcgccgagcagttcctgcgagacggcttccagcgaaaaagacgaaaaattccagaacgcggatttaagcgcgtcgataccatcgataatgactcgccctctggcctgggcgaaaaaaacgccgtttttgaagccatgttcgcgccactccagttcgctattgtctcgccccagccgtaaagggatacggtagcgttcggcatgtttttgcagcatacgcaggtcgaactgcactacgttccagccgatgatgacatcaggatcatgttcggcaaaccaggcgttgagtttttccagcagctgcgggcggctggcgacatacacaagctcgaagtccagttggtggtcatcgccattcgccgggcccagcatataaacggtacgctggccgcagccttccagaccaatgcaatacagttcgccgtgtcgcgtggtttcgatatccagcgagacccattttagcggcggtcgatagtcggagtggggtttaagacgcgcattgcggataacgccgttgcgcatctcgccgtctacccaaacgggcgacgtaataaaacgctccatcaggtaacgttccggcgggcgtacatccgcttcataaacggtgacgccgttttcgcgcagcagtttctccatccgcataagctggcggtgagtgcggcaatacagaccggataccggctgacgatgaaagtctcgcagctggagcggcgtcaggcgatagtctttttccgcctgtagcagcgaggcggcgcgggaggtctggctggtcggaataaacgccacggactcttgcggcgccagcgttgcctgcacagggccgttgtctgtcgccagccagaaagagacctccgtcccttgcggcgtatcccgccagtgccgggttaaaatgaaacctgcctgcgccacgatgattacctgtctaaaaaattcacgctaattataacctgttttagggggtaatactgttattttgtacaggcatataacgtaaaagccgatatccgctgtaataaaaagtttctcgcagtaagaagcgggtttgcgcccaccaggatttatagcgggtggatcgcgtgggtgatgagcggctatcgataccattatcctgagcgatagttttcagacgcagcatatgcagcggatcgctgaccagtaacgctgtgcgccattgttgttgtcgcagtatctgttttgcgtaacgaatattttcgcgcgtcacggtagagcgctcttcaataaaaattgccttagccggaatccctttttccagaacgtattgacgggctatcgccgcgtcggaaaccgttgcgccagcgccgtagccgccggttaataccaacgcgcggacaatgtgttgttggtaaagccagatggcatgatccagtctggcctgaaaaacgggagaaggcgtttttccgctaacgcctgctcctgcgacaatcgcgcagtcagctacgcgcgtctggttttgctgactgaactgataaatagcgatggcattatggataaacaccgtagccataatgagaattatgcctgccgcgattctgatgatgtagcgatatttcatgaatgagttcgttccccgtgacgggtgtaatggatattttaacgataaaatggcttttagcgtcagatatttttgctgacgtatatttatcaatatatacccaaaataattcgagttgcttaaaggcggcaagggagtgagtccccaggagcatagataactatgtgactggggtgagcgacaaatctgccgggagcagatttgaacgtcgcgtgcgacggcccgtcagggcaaggcccatggatgggccgagtaatccgtagccaacacataagcaactcgaagtatgaagggtataatgatgctggtgtagacagcagatataattatcctataactgctaattttgaatcatttttatttacagtttttacccatgtattagccgttttgtgtcaagtctgttttcatacattaagtatttttcagaaaggcgcttgttcgaatctgttacttatttctcggattaacaaaaaagcgatattttttgtttgttttaattaatgaaaagtgtaacaatttcatttggaacatccgcaccgtcaggtagaaatataatattccaattggccgctatggttaaataaaaatggattacagtgcgaattcgtcgggaactctctgcataatttaatttttattttagaatataattttattttgactttcgggtgcgggtgtttttatcaaaatttgtggtattcgggaatgatcttttatgaatgtgagtatgcaggcgcgtctggtagggaacgaccgttatcttttcgtcaatactcaacgcgctaacccttccataaaaaccgtgagtcgattttttgagtataaaacatggacagaacagatttggcgtaccgagattattgaaaacggcaatgctttttttcactggcaaggacacgacagaaaaaacggacatcgggataccattattaactatctgttaaatgggcaacgctggcagtcaacaatcgaagattatattttcttccatgcgctggaaggaaaagcgtggcagggacattatgacaatattattgaatatgtgagttctgatcattacgtctatcaaagcgcatttgctgaatatatcaccgaccagattcatcaacgcgccccccatgggacgcgtttttagaggcattactgcccgtaataggcttttgcgccgtgtttgcgtagatagtgtttatccagcagggattgctgcatgtcgggcaactgcggcgcaagctggcggcagaagatccccatataggccacttcttccagcacgatggcgttatgcactgcatcctcggcatttttaccccaggcaaacgggccgtgcgaatggacaagcacgccgggcatttgagcggcgtcaatgccttgtttttcaaaggtttcaacaatgacattgcccgtttcccattcatactcgccattaatttccgcctcggtcattttgcgagtgcagggaatcgtaccgtagaaatagtcggcatgggtggttcccgtcgccggaattggctgacccgcctgcgcccagatagtcgcgtggcgcgaatgggtgtgtacgatgccgccgatagtcggaaatgcctggtacaacagacggtgggttggcgtatcggacgacggtttcttatgaccttcaacgacttcaccgctctccaggctgaccaccaccatatcgtcagcggtcatgacgctataatcgacgccggacggcttaatcaccagtacgccgcgttcgcgatcgacggcgctaacgttaccccaggtaagggtgaccaggttgtgttttggcagcgccagattagcttccagtacctggcgtttgagatcttctaacattgttttctccctgccggatggcgcttcgcttatccggcctacgagcgacggtgtgccggatggcgacataaatgccttattcggcctacaggaccgtaggcccggtaaacgcagtgccaccgggcaatccgtttcaccaattaacgtttgaacccgtaatacacctcgttccagcgcagcgcgtccttaaaggccggcagatgggtatcgttatcaatcaccgcgatttcgatatcgtgtatttctgcaaactggcgcatatcgttcagatccagcgcgtggctgaagacggtatggtgcgcgccgccagccagaatccacgcttcggaggcggtcggcagatccggctgcgccttccacagcgcgttagccaccggcagtttcggcagggagtgcggcgtttttacggtgtcaatgcagttgaccagcaggcgataacgatcgccgaggtcgatcaggctggcgacgatcgccgggccggtttgggtattgaaaatcaaacgcgccggatcttccttgccgccaatgccgaggtgctggacgtcgaggatcggtttctcttccaccgcgatggacggacacacttccagcatgtgcgagccgagcaccagatcgttgcctttctcgaagtggtaggtgtaatcctccataaatgaggtgccgccctgcagaccggttgacatcactttcataatgcgaagcagagcggcggttttccagtcgccttcgcccgcaaagccgtagccttgctgcatcagacgctgtacggccagacccggaagctgtttcagaccgtgtaaatcttcaaaggtagtagtgaatgcgtggaagccgccctgttccaggaaacgcttcataccgagttcaatacgcgccgcctcccgcacgttctggcgtttatcgccgtggatttgggtggcgggcgtcagggtatagctgctttcatactcgtcaatcagagcgttgatatcgccgtcgccgatagaattcaccacctgcaccagatcgccgaccgcccaggtattgaccgaaaagccaaatttgatttgcgcggccactttatcaccgtcagtcactgcgacttcacgcatattgtcgccgaagcggcagacttttagctggcgggtatcctgtttagagaccgcctggcgcatccaggcaccgatacgcgtatgggcctctttatcctgccagtgaccggtgacgaccgcgtgctgctggcgcatccgcgcgccgataaaaccgaactcacgaccgccgtgcgcagtctggttcaggttcataaagtccatatcaatgctgtcccacggcagggcggcgttaaattgggtatggaattgcagtagtggtttgttaaggatactcagcccgttgatccacattttggccggggagaaggtgtgcagccagaccaccagccctgcgcagcgatcgtcataattggcgtcacgacaaatggcggtaatctcatccggcgaggtgcccagcggttttaataccagtttacatggcagtttggcttcggtattcagcgcgttgaccacatgctcggcatgttgggtgacctgacgcagggtttctgcgccatacaaatgctggctgccaatcacaaaccatacttcataattatcaaaaatcgtcattgtcgtgtccttaatgagtcaggattgcctgattggccggggtcgttggcgccggcgcggcagtcggaagataatgttgttctgcgcttagcgcccactgctggtagcggcggtaaagctgttcgaagcgttgcgcctgttcagggtgggggcgcagagtgcgttctaccgcgctcgccatgctttgctgggcggctggaatgtcggcatggactttcgcagcgacggcggcaaagatagcggcgcctaatgcgcaacactggtcggaagcgacgatctgcaacggacgattcagtacgtcgcagcagacctgcataatgacctgatttttacgggcgatgccgccaagcgccatcacgttattgaccgcgataccctgatcggtaaaacactcctgaatggcgcgcgcgccgaaggcggtcgaagcgaccagaccgccaaacagcgctggcgcgtcggtggcgagattgagatcggtaatgacgcctttcagacgctgattagcgtttggcgtgcggcgaccgttaaaccagtcgagcaccaccggcaggtgatccagggacggatttttcgcccaggcgtcggtgagcgctggcagtagctgcttctggctggcgttaatctggggtttcagttccgggtgctgcgcggcaagttgctccagcggccagctcaacacgcggctaaaccaggcgtagatatcgccgaaagcagattgccccgcttccagaccgataaagttcggcaccacgctgccgtcaacctgaccgcaaatgcctttcacggcgcgatccccgacgctctgtttatccgcaatcagaatgtcgcaggtagacgtgccgatgactttcaccagcgtattgggctgtgcgcccgcgccgaccgcgcccatgtgacagtcgaacgcgccgccggaaatcactacgctttccggcaagtcgaggcgctgcgcccattcggcgcacagggtgcccacgggcagatcggcggtgaaggtttcgctaaataacgggtagcgcagatgacggttaatgcacggatcgagttcatcaaagaagctcgcgggcggcagaccgccccagctttcatgccacagcgttttgtgcccggcgctgcagcggccacggcggatatcctgcgggcgagtggtgccggaaagcagcgccggcacccagtcgcacagctcaatccacgagacggcggcctgcgcgacggcgctatcctgccgggtgacgtgcagaatcttcgcccagaaccattcgctggagtaaatgccgccaatatagcgggagtagtcgaccttgcctggcttatggcacagacgagtgatttcgtcggcctcttccacggcggtgtgatctttccacagcacaaacatcgcattcgggttctcggcgaactctggacgcagcgccaggacgttaccgtcggcgtcaatcggcgctggcgtagagccggtgctgtcaacgccaatgccaacgacatttgcgcgttgcgcggcgcttaattgtgccagaacggctttcagcgcggcctccattgactccatgtagtcgcgcggatgatgacggaactggttgttcgggccgtcgcaataacggccttcttgccagcgcggataccactctacgctggtggcgatctcgtcgccggtggcgcagtccactgccagagcgcgcactgaatcactgccaaaatcgaggccaattgcaattgccatcgtcttactccatccagaaaaacaggtatggagaaacagtagagagtcgcggcaaaaaccgtcaggcaggatccgctaatcttatggacaaaaatgctaatgctttgcaaagtgtgacgctgtgcaaatattcaatgtggacattccagccatagttatagacacttctgttacttaattttatcgcctgaactgtacgcttttgttacaaagcgcttttcacaagcggggttgatacgtgctttcatcaagcgcaaagtcttgcggagacggaagctctgtcgtcctggtcgatatggacaatttgtttcttctctgaacatcggggggtagagaaatcatggctgaaacgcaaaatgatccgctattgccgggatattcatttaatgcccatctggtcgccgggctgacgccaattgaagcgaatggatatctggatttttttatcgatcgtccgttgggcatgaagggatatattcttaacctgaccatccgcggagagggcgtcattaataataatggcgagcagtttgtctgtcggcctggcgatatattattgtttccgccgggcgagattcatcactatggacggcatccggacgccagcgagtggtatcaccagtgggtttatttccggcctcgcgcctactggcaggagtggctgacctggccgacaatctttgcccagacaggatttttccgcccggacgaggcgcgccagccgcatttcagcgaactgttcgggcagatcatcagcgccgggcaaggggaaggtcgctattctgagctactggcgatcaatctgctggagcagttgttgctcagacgtatggcggtaattaatgagtcgttgcacccgccgatggatagccgtgtgcgcgatgcctgccagtatatcagcgaccatctggcggacagccattttgatatcgccagcgtcgcccagcatgtctgcctgtcgccctcccggttatcacatctgttccgccagcagttaggcattagcgtattgagctggcgcgaagatcagcgtatcagccaggcgaaacttctgcttagcactacgcgaatgccgatagcgaccgttgggcgcaatgttggatttgacgatcagctctatttttcgcgggtatttaaaaaatgcaccggggcaagtcctagcgagttcagggccggatgtgaataaaaagtgaatgatgtgtccacaaagatgtcataagccgtaactattcggataattgacggcttgacgaagggggacggggtaagcagaatccctgcttcatcacgctgacggacacactatgcaagcactgctggaacactttatcacccaatccactctgtattcgctcatcgccgtgttgctggtcgccttcctggaatcgctggcgctggtggggttgattttacccggcacggtactgatggcggggctgggcgcgcttatcggcagcggcgagctcaatttttggcatgcctggctggtgggtattatcggctgtctgatgggcgactggatttcgttctggctggggtggcgctttaaaaagccgctacaccgctggtcttttatgaaaaagaacaagtcgctgctggataaaaccgaacacgcgctgcatcagcacagtatgttcacgatcctggtcggacgttttgtcggtccgacgaggccgctggtgccgatggtggcagggatgctggatcttcccgtggcgaaatttattgggccgaacttgattggctgtttgctgtggccgccgttttatttcctgccgggcattctggcgggagcggcaatcgatattccttccgatatgcagagcggagatttcaaatggctgctgctggcgacggcgttgctgctgtgggtcggaggctggctatgctggcggctgtggcgcagcggcaaagcggcagtcgatcgtttaaccgcgtatttcccccgcagccgtttgctgtatctggcgccgttgacgctcgggatcggcgtggtcgcgctggtggtgctggttcgccacccgctgatgccggtatatatcgatattctgcgcaaagttgtggattactaacgattcctttgccggatggcagcttcgccttatccggcctacaaaatatgggatttgatgcccaatagcgctgaggcgctggcttgaccgcttagtagctcgtctgttttgccttgccacgcgatacgcccgtcggccacgacgattgaccggggcgcaattcgcgccgcatcttccacgctgtgcgagaccatcaacagcgtgagctgtcgctcgcggcagatatcgctgaccaacgtcagcatctcctggcgcagcgcgggatcgagcgcggagaacggttcatccagcagcagtaccggctgttcgcgtaccaggcagcgcgccagcgctacccgctgacgctggccgccggacagttcgcccggtaaacgcgtcatcagactctcaatgcccatctgatgtgcgatagcgtcccgtttttcccgctggctggcgttgagcgttaacccagggtttagccccagaccgatattttgctgcacattcaggtggctgaataaattattctcctgaaacagcattgagaccggacggcgtgagggcggcgtaagcgtatgatcgtcgccggcaatcagtagcgtaccgctggcaggcgcaagaaaaccggcaattaaattcaacaacgtgcttttccccgcgccgctggggccaagaatcgccacctgctcgccgcgttctaccgccagcgtaaaacgcatcggcaaatgatggtaaagccaggtgatatcaatcagttttagcatgtcggcccggtagtttctctatgagggtaaataacgtaaagcagagcagcagcagtatcagcgcggtcactgcgccgtcctggctgcggtaggagccgatctgctgatacagataaaacggcagcgtgcggaaattgtcattgccgaaaagcgcgacgacgccaaaatcaccgatagaaagtacgcaggcaaacgccagcgcctgcgccagcggacgtttcagcgcccgcagttccacgatctttaaccgcgaccagccttcaattcctaatgactggcacagcattccataacgggcggtaatatcgcgcattgggttttccaggacttttagcgcgtaggggattgccatcagcgcattggtgaaaatcacgatgccgtcggcggattccggtaagccaacgctgttattgagcagtaaaaagaagcctgtcgccagcacgatccccggcatcgcgaggatcaacattccgctgagttccagcgtttgtccggcgaatagttgctggcgttggcgtagctcgcggctactccacagcagcatcatggtcagcaccacacacagaacgcccgccgccagcgcaatgcgtagcgatgtccagacagcctgccacagaatgggttgcgccagcacctccggcaggctgcggttgacgccatcgaccaccacggcgaccagcggcggaagcagcagcagcagcgccagcacgattaataaggcgtccgtcagacggctgtggagacgatcgtcaggatcgcgccagccctgcgtcagcgtcatccccggcgcaatcgctttgctcaaccgttggcttagcagtaccagcgccaggcagcagaccatctggattaatgccagcatcgccgcgcgggcgggatcgtagtcataactgagcgcctgaaagatagccagttcgatagtggtggcctgcgggccgccgccgagcgacagaaccgttgcgaaactggcgaagcagagcataaaaatcagcgccgcgacaggcggaatttggcggcgcagccacggccattcgacaaaacggaaaaaatgccagccgcgcataccgagctgggcggcgagctggcgctgctcgccgggaatgctttccaaagattgcagcaacaaacggctcgccattggcaggttaaaaaagacgtgcgccagtaaaatgccctgcaagccgtagggggagaatgtccactgaagccccagcatctgccacagcgaggccagccagccctgacggccatacacgctaagaatgccgaacacggcaaccagtaccggcagaatcagcgtcatggcgcacagacgcagcagcgccagacgtccaggaaaacggcgtcgataaagcgcgcgggcgagaaaaaccgccgggaccacagacagcactgcggacagaaacgcctgccagaatgagaagcgcaccacatgccacaggtagctatcccgccagattgtcgaccacgcgcccgacggcgcattcagccaaagcgccagaaaggccgccagcgagacggttatcatcagcgcggcggcgcacagccccggaatcagccagccgggaattaacggctgacggcgcgttgccattcgctaatccatgcctggcgttgtgctgccacttgttgcggcgtgaattccagcgttgtggcgggtttggccaatgattcaaaccctgcgggtaaggcgacgtccgctaccgggtacatccagttgccggtgggtatggcgttctgaaacgccggagaaaccataaatttgaggaatttctccgccagttccggctgcttactggcgacggtacgcgccgcgacttctacctgtaagtaatggccttcgctgaagttcgcggcggcgtaattgtccttcttctcttcaataatgtgatacgccggagaggtggtgtaactgagcaccaaatcgctttcacctttcagaaataaaccgtaggcctcgctccagcctttcgtcaccgtcaccgttttggccgccagtttttgccaggcctgcggcgcgttatcgccatagactttgcgcatccacagtaacagccccagccctggcgtactggtacgtgggtcctgataaatcacccgccatttttgatcgctctcgaccagttctttcaggcttttcggcggatttttcagcttgcttttatcgtagacaaaggcgaaatagccgtaatcgaatggcacaaatgtgtcgtttttccagccgccgggcaccttgaccgcttcattcgccacgccgcttttggcaaagagtttagtttgcgtggccgcttccagcagattgttgtccagccccaacaccacatcggctttgctgttcttcccctccatccgcaggcggttgagcagcgaaacgccatcctccagcgccaccagtttcagctcgcagttgcaatcggcttcaaacgcttttttcaccgccgggcctggcccccagtcggcggcgaacgagtcgtaggtatagacggtgagaacgggtttggcgaaagcaggcgccgcgcacaggagtaaaagtggaagatatttttttaacactttgcacctcagttaaagagtggcaaaggacttgagaggtagcctcaaatcccttcgccggcattatccggatcaggttcgacgggtattttctcagcgcgcgcatgagcgcggcaccccgttgagttcggcgttagtgtagtgattttgttgccgggcagcaatcaagagctggcgttaaggatctggcggcgcaaaccacgccgatttaaaatcaaaccagccgagggtattcatgcgcagcccgcgcatactgcgctgtccctggataatcagccagtggtggatcaacggcacaatcgctttgttggccagcagttgctggcaccagttcgccaggttcatctcgccagcgcgccactgcgcggcgtcgccctgccagtcgcgcggaatgcagttctgcaagagcggtacttcgcacaagtgcgcgaacagcgagaaatccagcggcagcgtaaagttagcgctattgagccagatatcgctttcgatctcgccggcgtgccattgatcgtagtcgatctcctgaatatgcagatgcacctgatgttcagccagaagcgcgctcatgatacgggcgataacccggtgctcaatgtgttcgcgatagaaggtcagcgtgagggtttccagcccggcgggtttttcgcccgggcctggacgggcgtgatgccagcgcggtaaaagcccataggccgggaaccagagctgctgtagcggttcatcggcatgatagagtaaattggtgggggagaggacgtggcttacccattctctgacctgcggatgtgcgccgcgcggcgttctggcgtcgaatagcaggtaatagcacccctcttccagtcggctttctatcgctttttcaccgccttgtatcggcccttccagcatcaagccgcaggccggttcttcactgatatccggcagtacccagacgttcacttcgtctatcaacgcccgatagccgaagtaatcatcaaaggcgagtatcttgagctggtttggcgtattacgccgcacggcataaggcccggtgccgatagggtggctggcgaaattagccagcgtttcccactcccgcggcaaaatcatcgccgggacctggcccagcagccacggcaaccagcgatccggctgggaaagatgaatatccagcgtccacgcggtaggggagtctatctttgtgatgtgcgagtaaagcggaagcgtattgatacgcgtcagcgaggagatgacatcttccatctccagctcgcggccatgatgaaaatgaatgccggggcgcaggtagaagcgccacagtaaaggggaaatttgctgccagtggtgcgcaatgtccgcttccagttccccgttttcctcatttacccgcgtgagcgaactgaaaatttgccgggcaatatgagtttccgagcgacgtaatgcggttcccggcagaagattgtgcatcggacgatagtaaagaacccgcagaatatgccgcccctggcggaagctgcgtcccagatgggaaatcagcatttgcctgacagcgcttttatcgccgaccagttgtaccagttgatcgattcgatcttgttccagcaggtcttccgcccgctgctgttgcagcgccagtccggtatacaggaacgtcagacgcgaacgctttccgcgtccaacctcggcttcccatgttagccaaccgcgcgcctgcatcgtatttagcagcgtacgcatatggcgacgcgaacagttcagcagatccgccagctcattaagcgtggtgtcttgcgttttaccgtcacaacattgccagagacggataaattgttgttgcaggcgacctgagggcataaaaggggaactccgatgaaaaactcagcaattttattatccctatattaggccaataatatctttcgatgaagcaagaggaagaggtcactatgcgccagttctggttgagatattttgccgcgacggaaaaaacgtcctggctggcttgcctgagcgcaccgcagcgcttaaaaatgctcgcggaactgatgcagtgggaggcgaccgattgaagccaattgcagacatcatgtgtgactgagtattggtgtaggcgatagcctaaaatcacccgccagcagataatatctgctggctttttttatttcggctgtttctggatgacgatgatgggacggcgtttcaacgggatttatacggcggtttctgtggtcacgcaggtggtgaccgggcgagtaaaaatcgtataaaaaatgccggaatatccccggcatgagcgactgatgagtaacccggagcttgatggcgctacgcttatcaggcctacagaatataatggcaaccgggtgatattgcataacctgtaggcccggtaaggcgtcaagggttaccgcataaatgccggttgtttattttcgtaggcggcaatcgcgtcttcgtgctgcagcgtcagcccaatgctgtccagaccgttcaacatgcagtggcggcggaagtcgtcgattttaaagctgtaggttttatcgcctgctttcaccacctgtgcttccagatccacttcaaatttaatgcccggattggctttcaccagggcaaacagctcatcgacctgtgcgtcgctcagggttaccggcagcagttgattattgaaactgttgccgtagaagatgtcggcgaagcttggcgcgatcaccactttaaagccgtaatcggtcaacgcccacggcgcgtgctcgcgtgacgagccgcagccaaagttttcccgcgccaacagtatcgacgcgccttgatattccggaaagttcaacacgaattccggatttggctgttggcccttttcgtccaggaaacgccagtcgttaaacagatgggcgccaaaaccggtgcgcgtaaccttctgcaaaaactgtttagggataattgcatcggtatcgacgttggcggcatccagtgggacaaccaggccggtatgctgggtaaatttctctgccatggtagtttccttatttgatgctgcgaatgtcggcgaagtggccggtaacggcggcagcggcggccatcgccgggctgactaaatgcgtgcgacccccgcggccctgacgaccttcaaagttacggttgctggtggaggcgcagcgctcgcccgggttcaggcggtcgttattcatggccaggcacatggaacagcccggtaagcgccattcaaatcctgcttcgataaagatcttgtccagaccttccgcttccgcctgcgctttcaccggacctgaacccggcaccaccagcgcctgcacgcccggcgcaactttgcgccctttggcgacttccgccgccgcgcgcaaatcttcaatgcgtgaattggtacaagagccgataaagactttatcgatagcaacgtccgttaacggtacgcccggctgtaagcccatataagccagcgctttttcggcgctggcgcgctcaaccggatcgctaaaggaggcgggatcggggatgatgtcggtgacggaaatcacctggcccggattcgtgccccaggtcacctgcggcgcgatctcttctgctcgcagggcgacgacagtatcaaaggtcgcgccgtcatcggttttcagcgttttccagtactcgacggcttcgtcaaaatcgcggcccttcggcgcgtgcaaacgcccttttacgtagttgaaagtggtttcatccggggcgaccagaccggctttggcgcccatctcaatcgccatattgcacagcgtcatgcggccttccatactcagcgcgcggatagcgtcgccgcaaaattcaaccacgtgtccggtgccgccggcgctaccggttttaccgatgatcgccagcacgatgtctttggcggtaatgcccggcgcggcgttgcccgtgacttcaatcttcatggttttagcgcgtccctgtttcagggtttgcgtcgccagtacatgttctacctcagaagtgccgatgccgaaggccagcgcaccaaacgcgccgtgggtggcggtgtgggagtcgccgcagacgatggtcatgcccggcagggtgacgccctgttccggccccatcacatggacgatgccctgatatgggtgattcaggtcatacagctcgacgccgaactcgttacagttcttaatcagctcctgcatctggatacgcgccatttcaccggaagcattaatgtctttagtctgcgtcgagacgttgtgatccatcgtagcgaaggttttccctggctgacgtaccggacgatggtgcgcgcgcagaccgtcaaacgcctgcggagaggtgacttcatgcaccaggtggcggtcgatgtacagcagcggcgtttcgtttggcgcctcaaagaccacgtgggcatcaaataatttttcgtataacgttttggccatgattacaccccttctgcgacatagcgggcgataatatcgcccatctcatcggtactgactgcggcagcgcccctggctaaatcgccggtgcgaacgccctcttctaatgcgcgattgatcgcctgttcaatggccgttgccgcatcgttggcatccaggctgtagcgcagcagcagcgccagtgacaggatctgcgcaattgggttggcgatatttttcccggcgatatccggcgcggagccgccagccggttcatacaggccaaacccttgctcgttcaggctggcggagggcaacatccccattgagccggtgatcatggcgcattcgtcggacagaatgtcgccgaacaggttagagcacagcagtacgtcaaactgcgacgggtctttaatcaactgcatggtggcgttatcgatatacatgtgcgcgagttccacatcgggatacgttttcgcgacatcattgacgatttcacgccacaggatagagctttgcagtacgttggctttatcaatagaggtgactttacggcggcgtttacgcgccgattcaaaggcgatacgggcaatgcgctcgatctcaaagcggtgataaacttcggtatcaaaggctttttcgtactgaccgctgccttcacggccttttggctgtccgaaatagatcccgccggtcagctcgcgcacgcacaggatatcgaaaccgttagcggcgatatcggcgcgcaacgggcaaaatgcttccagtccctgatacagtttcgccggacgcaggttactgaataatttgaaatgtttgcgcagcggcagcagggcgccgcgctccggctggctttccgggggcaaattttcccatttcgggccgccgacggagccaaacagaatggcatccgcctgctcgcacccttcaacggtggctttcggcagtggatgaccatgattgtcgatagcaataccgccgacgtcatagtggctggtggttatacgcatatcaaaacggctgcgtaccgcatccataactttcagggcttgcgccatgacttccgggccgataccgtcgcccggcagtacggcaatatgatagttcttcgacattacacggtttccttgttgttctctttattttgagctttgcgttgcaattctttttcaacttcggcggcgcgccagatattgttcagtacgtgcaccatcgctttggcggaggattcgacgatatccgtcgccagcccgacgccgtggaagcggcgaccatgatggttcacgacgatatcgacctgacccagcgcgtctttgccctggcctttggcgttcaggtcgtatttaaccaactcaacgtcgtagccagtgatgcggttaatcgcctgatagatggcgtcgaccggaccgttgccgttcgccgcttcggccttgatctcttcaccacaggccagcttcacggaagcggtggcgatatcgctggagccggactgcacgctgaagtaatccagacggaaatgctctggttcttcttgctgtttattaataaacgccagcgcttccaggtcatagtcgaacacctggccttttttgtccgccagcttcaggaacgcgtcgtacaggtggtccatgttgtagtctgtgtccttgtaacccatctcttccatgcgatgtttcacggcggcacggccagagcgggaggtcaggttcagctgtatctggttcagaccgatggactctggcgtcatgatttcatagttttcgcggttcttgaggacgccatcctggtggatgccggaagagtgggcgaaagcgccgctgccgacaatcgctttgttggctgggatcggcatgttacagatctggctgacggtctggctggtgcgccagatttcgtggtgattgatgttggtgtgtacgttcatgatgtctttgcgcactttaatcgccatgatcacttcttccagtgcgcagttaccggcacgttctccgataccgttcatcgcgccttcaacctgacgcgcgcccgcatgtactgccgccagcgagttgcctactgctatccctaaatcgtcgtgggtatgaacggagatgatagctttgtcgatattggggacacgttcatacaggccggaaatgattcccgcaaactcaaacggcatggtatagcccacggtatcgggaatattaatggttctcgcgccggcgtttatagcggcttccaccacgcgcgccagatcgtcaacaggcgtccggccagcatcttcgcaggagaactctacgtcatcagtgtaattacgcgcccgcttaaccatgtataccgcgcgttcgataacctcatccagcgtgctgcgcagcttggtggcgatgtgcattggcgaggtggcgataaaagtatggatgcgaaacgcgtcggcgaccttcagcgcctgtgccgcgacgtcgatgtctttttctacacaacgcgccagggcgcaaacgcggctgtttttaatggtgcgggcgatggtttggacggattcaaaatcacccggagaagagaccgggaagcctacttccatgacatcaacacccatgcgctcaagggccagggcaatctgcagcttctctttcgcgctcaggctggcctgtaacgcttgttcgccgtcgcgtaaggtcgtatcaaaaataatgacttgctggctcatgatgtggtccttgtctccaggggcgccttgcgtcaggcataaaaaaacccgcgcaacggcgcgggttttgtttgacttcgagctgacttaatgttgaatgccgcccaccggtctaccgcgcacaataaatgcgttgagtagtagtagcccagtgaaacgaacgatatgtgacattaattcagctccagcgaatgcgttatgcttttagtggtactggatatgccgtttaatgtcaactctattttctgtcgccattgcattttgttgacgatatccggatacgtactttagctaattgtgctgggctgcgcgtccaataaaggataaaagaacgagtggacattcatacttttcattgtttgaaatatttaggcatttttgtttgcaaattggttaggggaatggcctgttaaaggtatgctaaaggtttggtttatctttttgatttgttttatattttaacaaataaccttgtttgcttaatggataaggataaagttattgataaattaatgttaactttttagctattaataatataaacatttaattgaaacttaaatgatcattcacttggtgtatgattgtgtattcgccatagttatggttatattgcttgcgtaatttaaacattatgaatcgcaatggtgtgactcaggacacattacgcttgcgctggcattctatttgtctctgtcagcgtctttatgttttccgaattttaacgctttccctttttcttattttatatgcatggtaaatcatattttcaggaattatttctgccttcagccagaaaaagggagttaagcgtgacagtggagttaaatatgccagaggtcaaaaccgaaaagccgcatcttttagatatgggcaaaccacagcttcgcatggttgatttgaacctattgaccgtgttcgatgcggtaatgcaagagcagaatattacgcgcgccgcccacacgctgggaatgtcgcagcctgcggtcagtaacgccgtagcgcgtctgaaggttatgtttaatgacgaactttttgttcgatatggacgaggaattcagccgactgcccgtgcatttcagttatttggttcagtccgtcaggcgttgcaattggtgcaaaatgaattgccgggatcggggtttgagccgaccagcagcgaacgtgtattcaatctttgcgtgtgcagtccgctggataatatcctgacgtcacagatttataatcgtgtagaaaaaattgcgccaaatattcatgtcgtttttaaagcgtcgttgaatcagaatactgagcatcagttacgctatcaggaaaccgagttcgttattagttatgaagaattccgtcgtcctgagtttaccagcgtaccgctatttaaagatgaaatggttttagtcgccagccgaaaacacccgcgtattagcggcccgctactggaaggcgatgtttataatgaacaacatgcggttgtttccctcgatcgttatgcgtcatttagtcagccgtggtatgacacgccggataaacagtcgagcgtggcttatcagggcatggcgcttatcagcgttctgaacgtggtttcgcagacgcatttggtcgctattgccccgcgctggctggcggaagagtttgcggaatcgctggatctgcaaatattgccgttgcctttaaaactgaatagccggacatgctacctttcctggcatgaagcggctgggcgtgataaagggcatcaatggatggaagatttattagtctctgtttgtaagcgataaaaccgggcagaataaatcagaaacaaattctggtttattctgctttttagcgtatatcaaaaattttatgctgaattaacggtgagcgatgcttttcgtcgctgtgaaaaatagatgaattgctgtaagtctgcatttataagcgattatttattaccaggtgtgattcagacggagtatttctccatttcttctcttcttgcctcctgattattctaaccttccccatctttacgtcattccacccaattgccaggcgtgatagcgagcggttaaggtgtccgtcaaaccgtgatgacaggtataaagtggaggcaagccgtggaaatgttgtctggagccgagatggtcgtccgatcgcttatcgatcaaggcgtaaagcaggtgttcggctatcctggaggcgcagtgcttgatatttatgatgcgctacataccgttggagggatcgatcatgtgctggtgcgtcatgagcaggccgcggtgcatatggcggatggcctggcgcgagccactggcgacgttggcgtggtgctggtgacttccggaccgggagcgaccaatgcgattaccgggattgctacggcctatatggattccattccgctggtgattctttccggccaggtcgccacctcattgattggctatgatgcctttcaggagtgcgacatggtggggatttcccgaccggtggtcaaacatagcttcctggtcaaacagacggaagatattcccctggtgcttaaaaaggccttctggctggcggcaagcggacgtcctgggccggtggtcgtggatttgccgaaagatattttgaatccggcgaaaaaaatgccgtatgcctggccggagacggtcagtatgcgctcttacaatcccacaacatcaggacataaaggacaaattaagcgtgccttgcaaacgctggcgtcggcaaaaaagccggtggtctacgttgggggaggggcgataagcgcggcctgctatgcgccgttgcgccacatcattgaaacctttaacctgccggtggtctcttcattaatgggactgggcgcatttcctgctactcatcgccagtcgttaggaatgctgggaatgcatggcacttatgaagccaatatgaccatgcataacgccgacgtgattttcgctgttggcgtacgatttgacgaccgcacgacgaataatctcgctaaatattgtccgaacgcgacggtattacacatcgacattgacccgacgtccatatccaaaacggttaacgctgatatcccggtggtgggcgatgcccgcctggtactggaacaaatgctggagctactggcgcaggatgcgccgtctcagccgcaggatgatattcgcgactggtggcagcagatagagagctggcgcgcccgtcagtgcctgaaatatgacgcggaaagcgaaagcattaaaccccaggcggtgattgaaaccctctggcgtctgacgaagggcgatgcgtacgtgacgtccgatgtaggacaacaccagatgtttgccgccctctattacccgttcgataagccacgtcgctggattaattccggcgggctcggcacgatgggttttggcctaccggctgcgctgggcgttaaaatggccctgccgaaagaaatggtggtctgcgtgaccggcgatggcagtatacagatgaacattcaggagctgtcgacagccttacagtatgaactgccggtactggttttgaacctgaacaaccgttatctggggatggtgaaacagtggcaggatatgatctattccggtcgccattctcagtcttatatgcagtcgttaccggattttgtgcgcctggcggaagcatatggccatgtcgggctgcagattaaccgtccggatgagctggaaagtaaactcagcgaagcccttgagcatgtgcgtaataaccgactggtgttcgtcgatgtcaccgttgatggcagcgagcatgtctatccgatgcagattcgcgggggcgggatggacgaaatgtggttaagcaaaacggagaggacctgatgatgcgccggattttatcggtattactggaaaacgaatctggggcgttatcgcgggttatcggcctcttttcgcaacgcggatataatattgaaagcctgaccgtcgcgccgacagacgatccgacgttgtcgcgcatgactatccagacggtaggcgatgaaaaagtgcttgagcaaattgaaaagcaactgcacaagctggttgatgtgctgcgcgtcagcgagctgggacagggagcgcacgttgagcgggaaatcatgctggtgaaaatccaggccagcggctacggacgggaagaggtgaagcgtaatacggaaattttccgtggtcagattattgacgttacgccaacgctgtataccgttcaactggcgggcaccagcgataaactggatgcttttctggcctcgctgcgcgacgtggcgaaaattgttgaagtggcgcgttcaggcgtcgtcgggctttcgcgcggcgataagattatgcgctgagcagattcgccggatgacgacgcgcgtgcgttttatccggtctactggctgatatctggcccaggtccgataagcgtagcgccatcaggcaggtttgccggatatcagccaacaggaattatcgcccaacccaatatcatcggttgggcttttttttgcgaaatccgtggtaacccggaataaaagcggttgccggagtgatcaaactgcgcttagatgttaacgattttaacccatgccgacataaaggttatggtttgtacaatttacacaaggggcaattgtgaaactggatgaaatcgctcggctggccggtgtctcgcgcacaactgcaagctacgttataaacggtaaagcaaagcaataccgcgtgagcgacaaaaccgtagaaaaagtcatggcggtagtgcgtgagcacaattaccatcctaacgctgtggctgccgggctgcgtgctggacgcacacgttccattggtctggtgatcccggaccttgaaaacacgagctacacccgtatcgcaaactatcttgagcgccaggcacgccagcgtggctaccaactgctgatcgcctgttctgaagatcagccggataacgaaatgcgctgcattgagcaccttttgcaacgccaggtggatgcaatcattgtttcaacttcgttaccgccggagcatcccttctatcagcgctgggccaacgatccgttccccatcgtcgcgctcgaccgcgcgctggatcgcgaacatttcaccagcgtggtcggcgccgatcaggatgatgccgagatgttggcggaagagctgcgtaaattcccggcggaaacggtgctttatttgggcgcgctgccggagttgtccgtcagtttcctgcgcgagcaggggttccgcaccgcatggaaagacgatccgcgggaggtgaatttcttatatgccaacagctatgagcgcgaagccgccgcgcagttgtttgagaaatggctggaaacgcatcctatgccgcaggcgctctttacgacatcgttcgcgctattacagggcgtgatggacgtaacgctgcggcgcgatggaaaactgccttcggatttagcgattgcgaccttcggcgatcatgagctgctggattttctgcaatgcccggtactggcggtggcgcagcgtcatcgtgatgtcgcggaacgcgtgctggagattgtgctggcaagtcttgatgaaccgcgtaaaccgaaacccggcttaacgcgtattcggcgaaacctttatcgtcgcggcattctgagccgtagctaaaggaccggcggtaaaagactctctcttctgccgccgtcaaacaaatgcgtatcagtaaaaatatcccttaaataattaagattattccttaaaattatccgaaaattcttttttattacctttcttttgtccgaaatcgtccacattccactaattaagacgtaacgagtcttttcctttgtattgttttgttacaagcaggcaagaaatcgtcgaattaacagccactttttgtctttggcgcgacagtcgctcgtaggcgctggtatagcaggcaccgcacacgttaaacaggcactgttaacacggtgcaatatgtcctaaaatgccgctcgcgtcgcaaactgacactttatatttttctcggattatattgagtccgttttaaacggcggtgggcctttggtttttttcttacaaatattcataacgttaatttggcttgcacgctgggcggaaattaatcaacgcagatattcgccgtaaacattggcttttttacttaggtaagcgttgtgacttgcttgacaagcttttcctccgctccgtaaactccttcgagtgggaatttgtgggataaagtggtaagaaggggtgagactggcatgttccggggggcaacgttagtcaatctcgacagtaaagggcgcctgaccgtgccgacccgttatcgggagcaactgatcgagagcgctaccggtcaaatggtatgtaccattgacatccatcacccatgcctgctgctttaccccctgcctgaatgggaaattattgagcaaaagttatctcgtctgtcgagcatgaacccggtagaacgtcgcgtacagcgtttactgttgggccatgccagcgaatgtcagatggatggtgcaggtcgattactgatcgcgccagttctgcggcaacatgccggactgacgaaagaagtgatgctggttggacagttcaacaaatttgagctgtgggatgaaacgacctggtatcaacaggtcaaggaagatatcgacgctgaacagtcagctaccgaaacgttatcggagcggctgcaggacttgtctctataagatgatggaaaattttaaacacactacggtactgttggatgaagccgttaatgggctgaatattcgtccggatggtatctatattgatggcacatttggtcgcggcggccactcgcgcctgatcctctcgcaactgggcgaagaggggcgcttgctggcgatcgatcgcgatccgcaggcgatcgccgttgcgcagaccattaatgatcctcgcttctccatcattcatggacctttttccgcgctggctgattatgtagccgagcgcgagcttaccggcaagattgacgggatccttctcgatcttggcgtctcttctccgcagcttgacgatgcggagcgcggtttttcatttatgcgcgacggtccgctggatatgcgaatggacccgacgcgcggccagtctgccgccgagtggttacaaacggcggaggaagcggatatcgcctgggtgctgaaaacattcggcgaggagcgttttgccaaacgtattgctcgcgccattgttgagcgcaatcgcgaacagccgatgacccgcaccaaagagctggcggaagtggttgcggcggcgaccccggtaaaagacaaattcaaacatcccgcgacccgtaccttccaggcggtgcgcatctgggtaaacagtgaactggaggagatagagcaggcgctaaaaagctcgctcagcgtactggccccaggcgggcggctttcaatcatcagtttccactcgctggaagaccgtattgtgaaacgctttatgcgtgagcaaagccgcggtccgcaggtaccggcgggattaccgatgacggaagcgcagctcaaaaaactgggcggtcgtgagttacgagcgttaggcaagttgatgccgggtgaaaaagaggtagctgaaaatcctcgggcccgtagttcagttctgcgtatcgcagagaggacgaacgcatgatcagcagagtgacagaagccctaagcaaagtgaagggatcgataggaagcaacgagcgccatgccttgcctggcgtgatcggtgacgatcttttgcggttcgggaagctgccactctgcttgttcatttgcatcattttaacggcggtgacggtggtcacgacggcgcaccatactcgtttactcaccgcgcagcgtgaacaattggttctggagcgcgatgcattggacattgaatggcgcaacctgatccttgaagaaaatgcgctcggcgatcacagccgggtggagcggatcgcaacggaaaagctgcaaatgcagcatgttgatccgtcccaagaaaatattgtagtgcaaaaataaggataaacgcgacgcatgaaagcagcggcaaaaacgcaaaaatcgaaacgccaggaagaacagaccaacttcatcagttggcgttttgcgttgctgtgcggctgtattttactggcgctggtttttttacttggacgcgcggcgtggctacagattatcgccccggatatgctggtgcgtcagggcgatatgcgttcgctgcgtgttcaggaagtctccacctcacgcggtatgattaccgaccgttccgggcgcccactggcggtcagcgtaccggttaaggcgatctgggccgacccgaaagaagttcatgacgccggcggcatcagcgttggcgatcgctggaaagcgctttctactgcgctcaatattccactcgatcagctctccgcccgtatcaacgccaacccgaaagggcgttttatttatctggcgcgccaggtaaatcctgacatggcggactacatcaaaaaactcaaactgccggggattcatttgcgtgaagagtcccgccgctactacccgtcaggagaagtaaccgctcacctcatcggttttaccaacgtcgacagtcaggggattgaaggcgttgaaaagagctttgataagtggcttaccggtcagcctggcgagcgaatcgtgcgtaaagaccgctatggccgcgtgattgaggatatctcctccactgacagtcaggcagcgcacaatctggcgttaagcattgatgaacgcttacaggcgctggtttaccgcgaactgaacaacgcggtggcgtttaacaaggcggaatccggtagcgcggtgctggtcgatgtcaataccggtgaagtactggcgatggcgaatagcccttcctataaccccaacaaccttgccggtacgccgaaagacgcgatgcgtaaccgtaccatcaccgacgtgtttgaaccgggttctacggttaagccgatggtggtgatgactgcgcttcagcgcggtatcgtcaacgaaaatacggtgttgaataccgttccataccgaattaacggccacgaaattaaagacgtggcgcgctacagcgaattaaccctgaccggggttctacagaagtcgagtaacgtcggtgtatccaaactggcgttagcgatgccgtcctcagcgttagtagatacttactcacgttttgggctaggaaaggcgaccaatttggggttggtcggagaacgcagtggcttatatcctcaaaaacaacggtggtccgacatagagagggccaccttctctttcggctacgggctaatggtaacgccgttacagttagcgcgagtctatgcaaccatcggcagctatggcatttatcgcccgctgtcgattaccaaagttgatccgcctgtacccggcgaacgcatcttccctgaatccaccgtacgcaccgtggtgcatatgatggaaagcgtggcgctgccgggcggcggcggcgtgaaggcagcgattaaaggctaccgtatcgcgattaaaaccggtacggcgaaaaaagtggggccggacggtcgctacatcaacaaatacattgcttacaccgcaggcgtcgcgcctgcgagtcagccgcgcttcgcgctggtggttgtcatcaacgatccgcaggcgggtaaatactacggcggcgccgtttccgcgccggtatttggtgccatcatgggcggcgttctgcgcaccatgaacatcgaaccggacgcgctggcaacgggcgaaaaaaatgaattcgtaattaatcaaggcgagggaacaggtggcagatcgtaatttgcgcgaccttcttgctccgtgggtggctggactacccgcgcgagaactgcgagagatgacgctcgacagccgtgtggctgcggcgggcgatctctttgtggcagtggtgggtcatcaggcggacgggcgtcgatatatcccgcaggcgatagcgcaaggcgtagctgccattattgcagaggcgaaagacgaggcgagcgacggtgagattcgcgaaatgcacggcgtaccagtcgtctatctcagccagctcaatgagcgtttatctgcgctggcgggccgcttttaccatgagccatctgaaaacatgcgtctggtggcggtgaccggcaccaatggcaagaccaccaccacccaactactggcgcagtggagccagttgctcggcgaaaccagcgcagtgatgggaacggtaggcaacggactgttgggtaaagtgatcccgacggagaacacaaccggttccgctgtggatgttcagcatgtgctggccagtctggttgcgcagggcgtgaccttcggcgcgatggaagtctcttctcacggcctggtgcagcatcgcgtggcggcgttgaaatttgccgcctccgtgtttactaatttgagccgcgaccatctcgactatcatggcgatatggcgcattacgaggcggcaaaatggatgctttattccacccaccatcatggtcaggcaatcgtcaacgccgatgatgaagttggacgccgctggctggcgtcgctacccgatgcggtcgcggtatcaatggaagggcatatcaaccctaactgtcacggtcgttggctgaaagcggaggcggtggagtaccacgaccgcggagcgacgattcgttttgcttcaagctggggtgaaggcgaaatcgaaagccgcttgatgggcgcgtttaacgtcagcaacttactgctggcattggcgacgctactggcgctgggctatccgttaacggatttgctgaaaaccgccgcgcgtttgcagccggtttgcgggcgtatggaagtgttcactgcgccaggcaaaccgacggtggtggtggattacgcgcacacgccggatgcgctggaaaaagcgttgcaggcggcgcgtctgcattgcgccggaaaattgtggtgcgtctttggctgtggcggggatcgtgacaaaggtaagcgcccactcatgggggccattgccgaagaattcgcggatatcgtcgtggtgactgacgataacccgcgtaccgaggagccgcgcgccattatcaacgatattctggccggaatgctggacgccgggcaggtcagggtaatggaaggccgcgctgaggcggtaaccaatgccattatgcaggcaaaagacaatgacgtcgtgctgattgcaggtaaagggcacgaggattaccagattgtcggcacgcagcgtcttgattattcagaccgcgtgaccgcagcgcgtttgctgggggtgatcgcatgattagcgtaacgctcagcaaaattgccgatgtccttggcgccgaacaccgcggggcggatctcacgctcgatacggtcattaccgacacacggaaagtgacgccgggatgcctgttcgtggcgctgaaaggggaacgctttgatgcgcatgattttgctgataaagcaaaagcgaacggcgctggcgccctgctggtcagtcgtcctctggatatcgatctcccgcaggtgattgtaaaagacacgcgtcaggcatttggccaactggccgcctgggtacgtatgcaggtaccggcgcgggtggtggcgttaaccggttcgtccggcaaaacctcggtcaaagagatgaccgccgcgattcttagccagtgcggaaatactctgtataccgcaggcaattttaacaacgacatcggcgtgccgataacgctgctgcgcttaaaccatgattatgactatgcggtaatcgagttaggcgctaatcaccagggagaaatcgcctggaccgttagcctgacgcgcccggaagcggcgctggtcaataacctggcggcggcgcatctggaaggcttcggctcgttggccggcgtggcgaaagcgaaaggcgaaatctataccggtttgcctgagaacggtatcgcgattatgaatgccgataataatgactggctgaactggcaaagcattattggcgatcgtctggtgtggcgcttttcgccgaatgcggcaaacagcgactttaccgctgcgaatatccacgtgacgtcacacggtaccgaatttaccctgcaaacgccgatgggcagcattgatgtgctgctgccgttgccggggcggcacaatattgccaacgcgctggcggccgctgctttatcaatggcggtgggggctacgctgacggcgattaaagcagggctggcggcgttaaaagccgtacccgggcgtctgttcccgattcagctaagtgaaaaccaactggtactggatgacgcttataacgccaacgttggttcgatgaccgccgcagtgcaggtcctttctgaaatgcccggctaccgcgtgctggtggtaggcgatatggccgagctgggcgcagaaagcgaagcgtgccacctccaggttggtgaggccgcaaaagcggcgggtattgatcgcgtgttaagcaccggaaaactcagtcaggctatcagccacgccagcggcgtcggcgaacattttgccgataaagccgcgctcattgcgcgtttacacgctctgcttcaggagcaaccaatgatgactattttagtgaaaggatcacgcagcgccgcgatggaagatgtggttcatgcgttacaggagaaaggttcatgttagtttggctggccgagcatttggtcaaatattattccggctttaacgtcttttcttatctgacgtttcgcgccatcgtcagcctgttgaccgcgctgttcatctctttatggatgggcccgcgtatgatcgctcgtctgcaaaaactctcttttggccaggtggtacgtaacgatggcccggaatcgcacttcagtaaacgcggtacgccgacgatgggcggcatcatgatcctgacgtcgattgtgatttccgttctgttatgggcttacccgtctaacccgtacgtctggtgcgtgctggtggtattgatcggctacggcattatcggttttgtcgatgactaccgcaaagtggtgcggaaagataccaaagggctgattgcgcgctggaaatatttctggatgtcggttatcgcgctcggcgtggcctttgcgctttatctcgtcgggaaagacacgcccgcgacccaactggtggtgccgttctttaaagatgttatgccgcaattggggctgttttacattctgctgtcctactttgtcatcgtcggtacgggtaacgccgtgaacctgaccgacgggcttgatggtctggcgattatgccgactgtcttcgttgccgccggctttgcgctggtggcctgggcgaccgggaacatgaacttcgccaattacctgcatattccgtatttacgccatgcgggcgagctggtgattgtctgtacggcgattgtcggcgcgggattaggattcttgtggtttaacacctatccggcgcaggtttttatgggcgatgtcggatcgctggcgttgggcggtgcgttgggcattatcgccgtgctgctgcgtcaggaatttctgctggtgatcatgggcggcgtctttgtggtggaaactctgtcggtcatcctgcaggtgggttcctttaaactacgcggacagcgtattttccgtatggcgcctatccatcaccactatgaactgaaaggctggccggaaccgcgcgtgattgtgcgcttctggattatttcgctgatgctggtgctgattggcctggcaacgctgaaggtacgttaatcatggctgattaccaggacaaaaacgtcgtcattattggtctgggcttaaccggactctcttgcgtggacttttttctcgcccgcggcgtgacgccgcgggtgatggatactcgcgtgacgccgccgggtctggataagctgccgcaagaggttgagcgtcacgttggcggcctgaacgacgagtggctcttagcggcggatttaatcgtcgccagccctggtattgctctggcgcatccctctcttagcgctgccgccagcgctggagtggaaattgtcggcgatatcgaactgttttgccgcgaagcgcaagcgccgattgtggccatcaccggctcgaacggcaaaagcaccgtgaccaccttagtgggcgagatggcgaaagcggcgggcgtcaatgtcggcgttggcggcaatatcggtcttccggcgctgatgctgctggatgccgatcgcgaattgtacgtgctggaattatccagtttccaactggaaactacctcaagtttgcaagcggcggcggcaacggtgctcaacgtcactgaagatcatatggaccggtatccgtttggtttgcaacagtaccgggcggcgaaactgcgcgtctacgagaaggcgaaagtgtgcgtagtgaatgccgatgacgcgttgacgatgccggtacgcggggccgatgaacgctgcgttagctttggcgtcaatatgggcgattatcaccttaatcgtcagcagggcgaaacctggctgcgagtcaaaggcgagaaggtgctgaacgtgaaagagatgaagctttccggtcagcataactataccaatgcgttagcggcgctggcgctggcggatgccgtaggtctgccgcgcgccagcagtttgaaggcgttgacgacatttaccggtctggcgcatcgcttccagctggcgttggagcataacggcgtacgttggatcaacgactcgaaagcgaccaacgtcggcagtaccgaagcggcgctaaacggtttgcatgtggacggtacgctacatctgctgctgggcggcgacggtaagtcggcagacttttctccgctgacacgctatctgaccggcgatcgtatccgcctgtattgctttgggcgcgatggcgcgcagcttgccgcactgcgtccggaaatcgcccaacagactgagacgatggaagaggcgatgcgtttgctggcgccgcgcgttcagccgggtgatatggtgctgctgtcgcccgcttgcgctagcctcgatcagtttaaaaattttgagcaacggggcgatgtctttacccgtctggcgaaggagttaggttgatgcgtttatctctcccccgtctgagaatgccgcgcgtaccaggctttggcctcctggcctggctgtttgcggcgcttaaaggctgggtgatggcttcgcgcgataaagacgccgacagtctgatcatgtatgaccgcacgctgctatggctgaccttcgggctggcggcgattggttttgtcatggtgacgtcggcctccatgccagtcgggcagcgcctggcgaacgatccgtttttgtttgccaaacgtgatgcgctctatatcttcctggcattttgtctggcgatggtcacgctacgtttgcccatgaccttctggcaaaaatacagcacgacgatgctgattgcgtcgatcattatgctgcttatcgtgttggtcgtcgggagctcggttaacggggcgtcgcgctggattgcgctggggccgctgcgtattcagcctgcggagtttaccaagctgtcgctgttctgctacctcgcgaactatctggtgcgtaaggttgatgaggtgcgaaataacctgcgcggctttttaaaaccaatgggcgtgattctggtgctggcggtgttactgctggcgcagcctgacctcgggacggtggtcgtactgtttgtcaccacgctggcgatgctgtttctcgccggggcgaaattatggcagttcatcgccattatcgggatgggcatctcggcggtgattctgttaatcctcgccgaaccgtatcgtattcgtcgcgttacttcgttctggaacccctgggaagatccgttcggcagcggttatcagctgacgcagtcgctgatggcttttggtcgcggtgagatatgggggcaagggctggggaattcggtgcagaaactggagtatttgccggaggcgcacaccgatttcatcttcgccattattggggaagaactgggttatatcggtgtggtattggcgcttttaatggtattcttcgtcgcttttcgcgcgatgtcgattggccgtaaggcattggagattgaccaccgtttttccggatttttagcgtgttctatcggtatctggtttagtttccaggcgctggtaaacgttggcgcggccgcggggatgctgccgaccaaaggtcttacgctgccgctgatcagttatggcgggtcgagtctgttgattatgtcgacggccattatgtttttattacgtattgattatgaaacgcgtctggaaaaagcgcaggcgtttacacgaggttctcgatgagtggtcaaccgaagcggttaatggtgatggcgggcggtaccggcgggcacgtgttcccgggactggccgttgcgcatcatttaatggcccagggctggcaggttcgctggctgggtaccgccgatcgtatggaagcggatttagtgccgaagcatggcatcgacattgactttattcggatctccggtctacgcggtaaaggcgtaaaagcgcttctggcggcgccgctgcggatttttaacgcctggcggcaggcgcgggcgatcatgaagcggtttaagccggatgtcgtgctgggaatgggcggttatgtttccggccccggcggtcttgccgcatggtcattgggtattccggtcgtcttgcatgagcaaaacggtatcgccgggctaaccaatcagtggctggccaaaatcgcgaccacagtgatgcaggcgtttcccggtgcgtttccgaacgcggaagtggtgggtaacccggtgcgtaccgacgtactggcgttgccgttgccgcaggtgcgtctggccggtcgtgacggcccgattcgcgtgttggtggtcggcggttctcagggggcgcgagtcctgaaccagacgatgccgcaggttgccgccagactgggcgatacggttacaatctggcatcaaagcggaaaaggcgcgcagctcacggtagagcaggcatatgccggggcgggacaaccgcagcataaggtaacggaatttatcgatgacatggccgccgcctatgcgtgggcggatgtagtggtatgtcgttccggcgctttaacggtgagcgagatcgccgccgccgggttaccggcgatattcgtgccgtttcagcataaagacaggcagcagtactggaatgcgctgccgttagaaaacgccggcgcagctaagatttttgagcagccgcagtttactgtagaggctgtcgccgacaccctggcggggtggtcgcgcgaggcgttgttaaccatggcggagcgtgcccgcgcggtatccattccggatgctaccgagcgcgtcgccagtgaagttagccgggttgcccggacataatttgtggcggtgccttttgcatcgcagggtttttctaccctcaataatttgggttgcaggcaagccaacgcatctgcaatttgaagtatggcgggtattggagttaatggcgtaaagaatgaatacacaacaactggcaaaactgcgttccatcgtgcccgaaatgcgtcgcgttcggcacattcactttgtcggcatcggtggtgctggtatgggcggtattgccgaagttctggccaatgaagggtatcagatcagtggttccgatttagcgccgaatccggtgacccagcagttgacgagcctgggggcgacgattttctttaaccatcgtccggaaaatgtgcgtgatgccagcgtggtcgtcgtttccagcgcaatttccgcggataacccggaaattgtcgcggcgcatgaagcgcgtattccggttattcgccgtgcggaaatgctggcggaactgatgcgttttcgccacggcatcgccattgccgggacgcacggaaaaaccacaacgaccgcgatggtgtccagtatttatgccgaagcggggctggacccgactttcgtgaatggcggactggtgaaagccgcaggcgttcatgcgcgtctgggccatagtcgttacctgattgccgaggcagatgagagcgacgcgtccttcctgcatttgcagccgatggtcgcgatcgtcaccaacatcgaagccgaccatatggatacctatcatggcgactttgaaaatttaaagcagacgtttattaacttcctgcataacctgccgttctacggtcgcgcggtaatgtgcgtcgatgatccggtcatccgcgagttgctgccgcgggtggggcgtcagaccacgacgtatggctttagcgaggatgctgacgtccgcgtagaagattatcagcagatagggccgcaggggcactttacgctgttgcgccagggaatgccggatctgcatgtcacgttgaatgcgccgggtcgccacaatgccctgaatgccgcggcggcagtggcggtagcgaccgaagaaggcatcgccgatgacgctatcctgcgcgcgctggaaagcttccaggggaccgggcgtcgttttgacttcctcggcgagttcccgcttgagccggtgaatggtaaagccgggacggcgatgctggtggatgactatggtcatcatccgactgaagtagatgccaccattaaagctgcgcgagcagggtggccggataaaaacctggtgatgctgtttcagccgcaccgttacacgcgcacgcgcgatctgtatgacgatttcgccaatgtgctgacccaggtcgatgcgctgctgatgctggacgtttacccggcgggtgaagcgccgattccgggcgcggatagccgttctttatgtcgtacgattcgtaatcggggaaaaattgacccgattctggtttccgatccggctcaggttgcgacaatgttagcgccggtgctgacgggtaacgacttgatattagtgcaaggcgcaggaaatgttggcaaaattgcgcgttacttatctgaaatcaagctgaagccgcaaatccaggaggaagagcaacatggctgataaaatcgcggtcctgttgggcggaacctctgcggagcgggacgtttcgttaaattccggcgcggcagtgttggccgggctacgtgaaggcggcattaatgcgcatcccgtcgatccgcaagaggtcgatgtcgcgcagcttaaagcaatgggctttcagaaggtctttattgcgttgcatggccgtggcggtgaagatggcaccttacagggaatgcttgaactgctcggcctgccttataccggtagcggcgtgatggcctcggcgctttccatggataaactgcgcagtaaattgctgtggcagggcgcaggcttaccggttgcgccgtgggtcgcgctgacgcgcgctgagtttgaaaaaggtcttagcgaagaacaaaaagcgcgaatttcggcgctgggtttaccgctgatcgtcaaacccagccgtgaaggctccagcgtcggtatgacgaaagtagtagaagaaaatgctttacagggtgcgttatcattggcttttcagcatgatgacgaaatactgattgagaaatggctgtgcggtccggaatttacagtggcgatagttggcgaagaaattttaccgtcaattcgtatccaaccggcaggaaccttctatgattatgaggcgaagtatctctctgatgagactcagtatttctgccctgccggtttagatgcgtcccaggaagccgcgctacagtctctcgtcctgcaggcatggaaagctttaggctgcacgggatgggggcgtattgacgtcatgctggacagcgatggtcagttttatctgctggaagccaatacttctccggggatgaccagccatagtctggtgccgatggcggcgcgtcaggcgggaatgagcttctcgcagttagtggtacgaattctggagttggcggactgatatgtcgcaggctgcgctgaacacgcgaaacagtgatgaagagacgccttcttcacgccgcaataatggaacgcgtcttgcaggaattttattcctgctgacggtactgtgcaccgtgtttgttagcgggtgggtcgtgttagggtggatggaagatgcgcagcgtttaccgttatcaaagctggtattaaccggcgagcgtcactacacgcgtaacgatgatatccgtcaggcgatactggctctgggcgcgccgggaaccttcatgacgcaggatgtgaacattatccagagccagattgagcgtttgccgtggattaaacaggccagcgtcagaaaacagtggcctgatgaattgaagattcatctggttgaatatgtgccgattgcgcgttggaatgatcaacatatggtcgatgctgaagggaacaccttcagcgtgccgtcagaccgcatcggcaaacaggttttacccatgttgtatggcccggaaggcagcgcgagtgaagtgttgcagggataccgcgagatggggcaggtgctggctaaggataaattcactctaaaggaagcggcgatgaccgcacgtcgctcctggcaattgacgcttaataacggcattaagctcaatctcggcaggggcgatacgatgaaaaggttggctcgctttgtagaactctatccggttttacagcagcaggcgcaaaccgatggcaaacggattagctacgttgatttgcgttatgactcaggtgcggcagttggctgggcgccgctcccccctgaggaatctaatcagcaacagaatcaggcacaggcagaacaacaatgatcaaggcgacggacagaaaactggtagtaggactggagattggcaccgcgaaggttgccgctttagtaggggaagttctgcccgacggtatggtcaatatcattggcgtgggcagttgcccatcgcggggtatggataaaggcggggtgaatgaccttgagtcagtggtgaaatgcgttcagcgcgccattgaccaggcggaattgatggccgattgccagatctcctcggtatatctggcgctttccggcaaacatattagctgtcagaatgaaattggtatggtgcccatttccgaagaggaagtgacgcaagaagatgtggaaaacgtcgtgcatactgcgaagtcagtgcgcgtgcgcgatgaacatcgcgtgctgcatgtgattcctcaggagtacgccattgactaccaggaaggcattaaaaatccggtcggtctttccggcgtgcgtatgcaggcgaaagtacatttgattacctgccacaacgatatggcaaaaaacattgtcaaagctgttgaacgttgtggtctgaaagttgaccaactgatatttgccggactggcggccagttattccgtgttaacggaagatgaacgtgaactgggcgtctgtgtcgtggatatcggcggtggtacaatggatatcgccgtttatactggcggcgcgctgcgtcataccaaagtgatcccttacgcggggaacgtggtgaccagcgatatcgcttatgcctttggtacgccgccgagcgatgctgaagccattaaagttcgccacggttgcgcgctgggttccattgtcggtaaagacgagagcgttgaagtaccgagcgtaggcgggcgtccgccgcgcagcctgcaacgccagacgctggcggaagtgattgagccgcgttacaccgagctgctcaatctggtcaacgaagagatattgcaattacaggaacagcttcgccaacaaggggtaaaacatcacctggcggcggggattgtgttaaccggcggcgcggcgcaaatcgaagggcttgctgcttgcgctcagcgcgtgtttcatacgcaggtgcgtatcggcgcgccgctgaatatcaccggtctgacggattatgcccaggagccgtattactcaacggcggtgggattgcttcactacgggaaagagtcccacttaaacggtgaagcagaagtggaaaaacgtgttacggcatcagttggctcgtggatcaagcgacttaatagctggctgcgaaaagagttttaatttttatgaggccgccagatattacggcctcaggcgacaggcacatgacggagagagattatgtttgaacctatggaactaaccaacgacgcggtgattaaagtcatcggcgtcggtggtggcggcggtaacgctgttgaacacatggtgcgcgagcgcatcgaaggtgttgaattcttcgcggtgaataccgacgctcaggcgttgcgtaaaacggcggttggccagaccattcaaattggtagcggcattaccaaaggtctgggcgctggcgctaacccggaagtcggtcgtaacgcggcggacgaagaccgtgaagcgctgcgtgcggcgcttgaaggcgcagacatggtatttatcgcggcaggcatgggcggcggtaccggaaccggcgcggcgccagtggttgctgaagtggcaaaagatttaggtattctgaccgttgccgtggtgactaagcctttcaattttgaaggcaaaaagcgcatggcatttgcggagcagggtatcaccgagctgtccaagcatgtggactcgttgatcaccatcccgaacgacaagctgctgaaagtgctgggccgtggtatctccctgctcgacgcgttcggcgcggctaacgacgtgctgaaaggcgcggttcagggcatcgcagagctgatcacccgcccgggtctgatgaacgtcgactttgctgacgtgcgtaccgtgatgtctgaaatgggctacgcaatgatgggctccggcgtggcgagcggtgaagaccgtgcggaagaagcggctgaaatggctatttcttctccgctgctggaagatatcgacctgtccggcgcgcgcggcgtgttggtcaacattactgcgggcttcgacctgcgtctggatgagttcgaaaccgtcggtaacaccatccgtgcctttgcatcggataacgccaccgtggttatcggtacttctctggacccggatatgaacgacgaactgcgcgtgaccgttgttgccactggaattggtatggacaagcgtcctgaaatcactctggtcaccaataaacaggtgcagcagccggtgttggatcgttatcagcagcacggtatggcgccgctgacgcaggagcaaaaaacggtcgcgaaagtggttaacgacaatacaccacaggcggcgaaagagccggattatctggatatccccgcattcctgcgtaagcaagctgattaagaattagctggaatttgggattctgggctctttgtgctaaactggcccgccgaatgtatagtacacttcggttggataggtaatttggcgagattatacgatgatcaaacaaaggacacttaaacgtatcgttcaggcgactggcgtcggtttacacaccggcaaaaaagtcaccctgacattacgccctgcgccggccaataccggggtcatctatcgtcgcaccgacttgaatccaccggtagatttcccggccgatgccaaatctgtgcgtgataccatgctctgtacgtgtctggtgaatgagcatgatgtacggatttcaaccgttgagcacctgaatgctgctctggcgggcttaggtatcgataacatcgttattgaggttaatgccccggaaatcccgatcatggatggcagtgccgctccgtttgtctacctgctgcttgatgccggtattgatgaactgaactgcgccaaaaaattcgtacgcatcaaagagactgttcgggttgaagatggcgataaatgggctgaattcagaccgtacaatggttttacgttggatttcaccatcgactttaaccatccggcgatcgattccagcagccagcgctacgcgatgaacttctctgcggatgcgttcatgcgccagatcagccgtgcgcgtaccttcggttttatgcgtgatatcgaatatctgcagtcccgcggcctgtgcctgggcggcagcttcgattgtgccatcgttgttgacgattatcgcgtattgaacgaagacggcctgcgttttgaagatgaattcgttcgtcacaaaatgcttgacgcgatcggtgacttgttcatgtgtggtcacaatattattggtgcgtttaccgcgtataaatccggtcacgcattgaataataaattgttacaggcagtcctggcaaaacaggaagcctgggaatttgtgaccttccaggacgacgcagaactgccgttggctttcaaagcgccttcgacggtactggcataacgacatacgctgtcgtataaaattcgactggttaacctggcactctctccggccaggcgagccagtcgttttttttactatcctttatctgcgctttccttaatacagccattttgacagggttaaatggaaacacggcgcgttcgctgttttcttagccgattttcaccttagcttctcgtcattactgctgtagcgcgtacgctttaatgataagatttgtgcgcaaattgttttgattccgtaagcccatgaggggcatatcaggtggcaatgacgtgagtggaatactgacgcgctggcgacagttaggcagacgatacttctggccgcatctcttattagggatggtcgcggcgagttttggtttgcccgcgctcagtaacgccgctgaaaccaatacgcctgcaaggacgaccgccagcaccgcgtctaaagttaactttagccattttgcgctgttagaagcctctaaccgtcgtcccaatttcaccgtagattactggcatcagcacgctattcgcacggtgattcgccacctttcttttgcaatggcgccgcaaacgctgcccgttgccgacgcgccgtcgccattacaggcgcatcatatcgccttactgaatacgctcagcgcgatgctcacgcaggagggcacgccgccggcgattgttcgtcgcctctccctggcgtattttgcgccacaaaccgcatttagcatcccggcctggataagtcaggcgcagggtatccgcgccggtccgcaacgtctcagctaacgaaaaaagacccttttactttatttgtagctccgcggcgcggggcatttgagactttattatgctaatcaaattattaaccaaagtattcggtagccgtaacgatcgtacgctgcgtcgtatgcgtaaggccgtcagccttattaatgcgatggaaccggagatggaaaaactctccgatgacgaactgaaagcgaaaaccaacgaatttcgcgcccgtattgaaaaaggcgaaagcgtagagagcctgattccggaagcgttcgcggtggtgcgtgaagccagtaaacgcgtctttgggatgcgtcacttcgacgttcagctattgggtggtatggtgctcaacgatcgttgtatcgccgaaatgcgtactggtgaaggtaagacgctgaccgcaacgctgccagcctacctgaacgcgctgtccggcaaaggcgttcatgtggtaaccgtgaacgactatttggcgcagcgtgacgccgaaaacaaccgtccgctattcgaattcctcggtatgtccgttggtatcaacctgccaggtatgcctgcgccagccaaacgtgaagcttacgctgccgacatcacttacggcactaacaacgaatacggttttgactacctgcgcgacaacatggcgttcagcccggaagagcgcgtgcagcgtaaactgcattatgcgctggtggatgaggtcgactccatcctgatcgatgaagcgcgtacgccgctgatcatttccggcccggcggaagatagctcggaaatgtacaaaaaagtgaacaaaatcattccgcacctgattcgtcaggagaaagaagattctgacactttccagggcgaaggccacttctccgttgatgagaaagcgcgccaggttaacctgaccgaacgcggtctggtgctgattgaagagctactggtgcaagaaggcattatggatgagggcgagtcgctctactcgcctggcaatattatgctgatgcatcacgtcaccgccgcgctgcgcgcgcacgcgctgtttacccgtgacgtggattacattgtgaaagacggcgaagtcatcattgttgatgaacataccggtcgtaccatgcaggggcgtcgctggtctgacggtctgcaccaggcggtagaagcgaaagaaggcgttgaaattcagaatgaaaaccagacgctggcgtctatcaccttccagaactacttccgtctgtatgaaaagctggccggtatgaccggtacggcggatactgaagccttcgaatttagctctatctataagctggacaccgtcgttgttccgaccaaccgtccgatgatccgtaaagatttgccggatctggtctacatgaccgaagcggaaaaaatccaggccattatcgaagatattaaagaacgtaccgcgaacggtcagccagtgctggtcgggacgatttctatcgagaaatctgaagtggtctccagagagctgaccaaagcgggcatcaaacataacgtactgaacgcaaaattccacgccaacgaagcaggcatcgttgcgcaggctggttatccagcggcggtcactatcgctaccaacatggcgggtcgtggtactgatattatgctgggcggtagctggcaggcggaagtcgccgcgctggaagcgccgacggaagaacagattgcgcagattaaagcggactggcaggtacgccatgacgcggttctggctgccggcggtctgcatatcattggcaccgagcgccatgaatcccgccgtatcgacaaccagctgcgtggccgttccggtcgccagggcgatccgggttcttcccgtttctacctgtcgatggaagatgcgctgatgcgtattttcgcctccgatcgtgtctccggtatgatgcgtaaactgggaatgaagccgggcgaagcgattgagcacccgtgggtgacgaaagctatcgctaacgcgcagcgtaaagtagaaagccgtaacttcgatattcgtaagcaactgctggaatatgatgatgtggcgaacgatcagcgccgtgcaatttatacccagcgtaacgaactgctggatgtgtctgacgtgagcgacaccattaacagcattcgcgaagatgtctttaaggcgactatcgacgcctacattccgccgcagtcgctggaagagatgtgggacatcccgggtttgcaggaacgcctgaaaaacgacttcgacctggagatgccgattgccgaatggctggataaagagccggagctgcatgaggagacgctgcgtgagcgcatcctggcgcagtccatcgaggtgtatcagcgtaaagaagaggtggttggcgctgaaatgatgcgtcatttcgaaaaaggcgtgatgctgcaaacgctcgattccctgtggaaagagcatctggcggcgatggattacctgcgtcagggtattcatctgcgtggctatgcgcaaaaagatccgaagcaggaatacaagcgcgaatccttcgctatgttcgccgcgatgctggaatcgctgaaatatgaagtaatcagtaccctgagcaaagtccaggtacgtatgccggaagaggtcgaagcgatggaaatgcagcgtcgcgaagaggcggagcgcctggcgcagatgcagcagctaagccatcaggatgacgatgccgccgtggctgccgatctggccgcccaaaccggcgaacgtaagattggacgtaacgatccttgcccttgcggttctggtaagaaatacaaacagtgtcacggtcgcctgagctaatgcgataaacttaccggcctgataagacataatgtgttgccatcaggtcagtactggcattattgccgaagggcgctacgcttattcggcctggcattgaacacagataaaaaggcgcaggcgactgcgccttttttatggatgcaacaagatgaaaaaactgcaaatcgcggttgggattatccgcaacccgaacgacgaaatttttattacccaacgcgccgctgatgcgcatatggcgaacaagctggaatttcccggcggaaaaattgaagccggcgaaacaccagagcaggcgttgatccgggagctacaggaagaggtggggattacgccaacacaggtgacactattcgacactctggaatatcaattcccggatagacacattacgctgtggttttggctggttgaacgctgggagggcgaaccgtgggggaaagaaggacagccgggacggtggatcgcgcagaacgcgttgagtacggacgattttccgccggccaatgaaccgattattcgtaaattacgccaatttgcgctttagtgggggatcgcaacacgatccccatcgatcttattagcgatttaatgtcgacataatttccggccagtagcgggggccggccgcggcgtcgtgaggaaaaaccgcctcaattgccgtcagctcctgcgggcttagggtcagtgataacgcgccgaggttttcatccaccctggcgcagtggcggctacgtttctgttatagcctaatctcgccggtttatttgtattatcccggccgcgcgcatatggcaccaaaactacgcgtatttattgattatttttgtcataaggcgatattgccgtctcaacagagccatcaccgttagcgctcttcgctccagtcgtcgctatcagactgatcgccgctgctggcgattcgtttctcttcggcggcccattcgcccaaatcaattaactgacagcgtttagaacaaaatgggcggaaggggctaatttccccccagacgaccggtttaccgcaggtcggacagtttacgacggtcacgtcagacatttttactccttagcaacaggccagttcaaaatcaagacgctccggcaccagaccattttcactatccagcggcataaagcgaatggcaaaacggctcttatggccggaaatttgcggataaagttgtgaatcgagcgtcagcataagacgcagcaaatcggcgtcgtccccgttatcctgataaaaaccgttcaggctggtttgcttacggaaaggcgctgaattacggatcagatcaagcaccagcgtcagcgcctgggtgaggggattcaggctggcaagccagctttcaatctgggcatcgcgctgcgcctgttgtaggtgcaaccagatatgcagagtgggtaaatcgaaactgcaacagccgccaggaatacttaagcgttgacgcacaagagcaatcaagcgatcttcgcgtagctgctggccaatcctcggggcggagatcagcacgctgcccgccgattttaactgctggcgcagggcttcaatacggtcttgatcgacgccgggaacctcaacccaggcctgtaatttacgctgctggcgctccagttctttcagcagttcggtacggacttcgccccgttcgaacacatccagtagatcgctgatattacggaaaaaatgcagtgcgccagcatggtctgcaattggcaggttgatggagagctgttggatcaaaaactctatgcgcagccacgtacgcatcttctcattgagagggtgttcaaataggacctgggtgtgcattacggtttttcctgtgagacaaactgcgacgcgagcttaagataactggcgtgcaggcgggccacatctgatgcgatagcatccggtgcgccgttattatcaataacatcgtccgccacggcaaggcgcgcttcacgcgtcgcctgcgcagcgagaatgtgttcaacatgctcgcgcgtaacatcatcacgctgcattgtgcgtatgagctgcgtttcgggcgtcacgtcaaccaccagtacgcggttggctttttgatacagcctgttttcaaccagcagaggcacaacccataacacatagggcgacgtagcctgctgaaactgtcgttgggtttcctgctgaattaagggatgaagcagagcgttaagccaggctttttcttccggatgcgaaaaaatacgctcacgcagcgcccggcgacgtaacgtgccgtcggcggcgataagttcagaaccaaaatgttccgctattgcgttcagggcgggctgccctggctcaaccatctggcgcgcgataatatccgcgtcgatgacggttattccgaggtcagcgaaggcatcagcgacggtacttttaccgctgccaataccgccggttaaggctacggtatacctcatatctccagcttccggaattttagtttgataatcaaaaggttaaattttaaacatacaaagacgatacgctctgagcattaacctactattcgccaggtaaatttatgggattgtaacgtaaaaaaagagaatttcgcagtcttgtacggccatgattagtgcgtatgatagcgtcactggagttgtgagtttcgatttttcgccattaaccccaggaatccgtacatgcgtattgaagaagatctgaagttaggtttcaaagacgttcttatccgtcctaagcgttctaccctcaaaagccgttccgatgtcgaactggaacgtcaattcacctttaaacactcaggtcagacctggtctggcgtaccgattatcgcggccaatatggataccgtcgggacgtttgaaatggcgcaagcattggccgggtttgatattctgactgctgtacataaacattataccgttgaagaatgggcagcttttatcaacacggcctcggctgatgttctgaagcatgtgatggtttccaccgggacctctgatgctgatttcgaaaaaaccgtgcagattctggcgctgaatcctgcgctgaactttgtctgtattgatgtggccaatggctattcagaacattttgtgcagttcgtcgcaaaagcgcgtgaagcatggccgacaaaaacaatctgcgcaggcaatgtggtaacgggcgagatgtgcgaagagcttatcctctccggcgccgatatcgtgaaagtgggaattggtcccggctccgtatgcacgacgcgtgtaaaaaccggcgttggttatccgcaactgtcggcggttatcgaatgtgctgacgcggcgcatggcctgggcggtatgatcgtcagcgatggcggctgcaccatgccaggcgacgtagcaaaagcctttggcggcggcgcggatttcgttatgttgggcggcatgctggcggggcacgaagagagcggcggcagcgtggtagaagagaacggcgagaaatttatgctgttctacggcatgagttcggaatctgcgatgaaccgtcatgtcggcggcgttgcgaaataccgcgcggcagaaggtaaaacggttaaattgccgctgcgtgggccggtgggcaatactgcccgcgatatcctgggcggtctacgctcagcctgcacttatgtcggcgcgtctcgcctgaaagagttgaccaaacgcaccacctttattcgggtgcaggaacaagaaaaccgcattttcaatagcctctaatattctggctggcgtaaatgtgcgccagccttatcccatcccgctcatcgcgtctcccagatgaaaaatcggcaaatacatcgccactaccagcgtaccgataattaagccggtgatgatcaataacgccggttccaacagcgacgccagattatcggccagcgccagcgtagtttcactgtggtgacgggcaaggttatgcagcatgatatcgagtgaaccggacgcttcgcccgttctgaccagttgcaggcatagcggactaaattcctgggtattttttagcgccaaccagaccggattgcccgcggcgatctcctgatgtacctgcgttaaacgctgtgaccagtaagggcagccgagactatcgatagcgctttccagtccctgaagaaaaggaatacctgcgctttgggttaatgccagtacggtgaatatttgcgctagtttctggcctcttatcaggcgacccataacgggaagccgtagcagaagacgctgccgctgcgcttgccaggacggcttttgttttaccctgcggtgagcgatagcaacgagcatcgtcaggaacaagatgagccaaccccatgccgacccccattgcgctatcgcaataataccgcgtgtcagaagaggaagcggggtattgaagctacggtaaatggcggcaaattccggcaggacaaagtgcagcatggcgaaaacgaccagggcggccattgttagaataatggcgggatagcgcagcgcctttttcacgctaaccgtaatctgccgttgcgctttttgctgacgggccagttcaaagcagcattcggccagtttgccggtcagttctccggtgcggatcatcgtctggtagagcggcggaaatacctgcggccaggagactaatgcgctggaaaaagggacgccctgttcaagctcgtgagccagcgtgcgcaacagcgcttgccattgtcggtggggatgctgtttcgcaaggagttccagcccttctgaaagcgtcagcccggcatgaatgagcgtggccaactgatgaataatttcagcgctttgctcttctttccacagtgcggcgttaacgcccatgcgcttgatgcgaagcggcataatgcgctgatgttgcagggtgatgatcagcgccagacgattgtccgcccatacaacgtcttgttccagttgacctttatcgttaacgccttgccagcgccagagctgtttaacgctcatggggcattcccagaacgcgcagtatctcttcaaaggacgtcatgccttgctcaacggcgcgacagccattttcaaaaagcgtccctgtaccggtctgttggaggtgggcttccagtgcttgcgccgatgcgccgctcgcaattaactgacgtaatgccggggtaacggttaacacttcgaataacgcggttcggccataaaagccgtggtagcaatgctgacagccgcttgcctgccagcgcggtatcgcgctgggccaaagattgggcgatagcaccacgggatcgctcagacgctgtttgcagtgcgggcaaagcttccttaccaggcgttgcgctaccaccagcgtaagcgccgatgagatcatccagcgtgctacgcccatttgctgcaaacgtatcagggtttcgctggtggagttcgtatggagcgttgaaagtaccagatggcccgtttgtgccgccttaatggcgatttctgcggtgtcgccgtcacgaatttcacctaccatgatgatgtcagggtcctggcgtaaaagcgcgcgcagcacattttgaaaggtgagcccggcgcggggatggatctgcgtctggttaatcccatccagtggaatttctatcggatcctcaacgctacagaggttgatacccggcgtattccgggtttgtagcgcgctgtatagcgtgaccgtttttccgctaccggtggggccagtcaccagtaccagcccctgaggttgctgtagggcttgtctaaaagcggtaagttgtgccccgtacatgcccagcgtgtccagatccagcgtttgttcaacctgatgcaacaaccgtaagacgactttttcgccttctttacagggaagcgtggcgatacgaaaagagatgctgtcgcccgccaggtcaacggtaaattgcccgtcctgcggcagtcgatgttcagcgatgtccaaatttcccaggactttcaatctggccgtcagcgcaagccccgtctctttggcgatgtcctgcagaatatgaagaacgccgtcgatgcggagtcttattcggtagcggctggcgccgggttcgagatggatatcagaggcgcgtttcgccatcgccgagcgtaatgtctgattgagaagctgggctgcggtttctccgcctttcgcggcgtttgccgagggtgcctgatccggcttatgccgatgattttccatttgctggcgagtccagcacacaatatcaatctgtttttgcgtggcgaaatgcagagcgtccagtaacgcatgagagggcgcgtcgaccaccgcaacagtgatactgttgctggcgctattgatcagtacagcctgatgacgttgacacaaggtgttgagctgagcgtctttcatcttgtctccttagttggcgtcaaaacggaagacatcttcacaagcctgttgtaacgcgctgtcgctttgaatattgcagttacgcgtccagccagtaatgccgttagcattgtcccaggcgggcgtcatgatgacgctaagcccgctcagactctcctggccggtaagcgtgatgacgcctttttccacgctcatgcccgaaacataacgggtgatgacgggcgaggggataccgttgacgcccgcatcgcatgtgctcgtcccaccatgttccagagcgcagagttcgacggcagtacggtaggggacaaacgtttgcaacatatccgtcagcgccgctttacgcagatagttctggtaagccggaatgccaatggcgcttaaaatggcgatgatgccaataacgaccatcagttcgataagcgtgaaaccgcgttgtttttccattgttcgctccttgagttagctggcgctactgtggcaaacgcgggaagagcgggcgagcggcaaaaggtaaaacgggaaggcggattctgaagattttcgctgcgttacatgacacggcaacgttattgcgaggcgctacgaatattttaccgaataatgacgcggatctacggacaggtgatttatagacccgacggcgcagcgccatcgggtggagaggatcagcaaaaacgcatggagagatcgagcgcgcgcacgtgcttggtcagcgcgccaacggagatgaaatccaccccggtttcagcaaattcgcgtaaggtttccgcggtgacgttgccggatacttccagccgcgcctggccgttgacgcgtttcaccgcctcgcgcatctggtcggtgttgaaattatccagcatgataatatccgcgcctgctttcagcgcatcgtccagttcatccagattttcgacctcgacttctaccggcacgtccggatgtagccagaacgctttttccaccgcctgacgaaccgaaccggaggcgataatatggttttctttaatcaggaacgcgtcagtgaggcccagacgatgattggcgccgccgccgcataaaaccgcatatttgagcgcggtgcgcagacccggcagcgttttacgcgtgtcgagcaactgggtttgggtgccagccaacagtccaacgtagcggcgtacttcactggcgacgccggaaagggtctggacaaagtttagcgccgtgcgctcgccggtcagcaatacgcgagccgggccgttcagttcaaacactgtttggttggcgtgaatggcgtcgccgtcatcgacatgccaggtgaggcgcacatcatcgcccgccagttggatgaagacctcttcaacccagcgcttgccgcagaaaacgccgtcttcacgagtgatcaccgtggcatgggcttgcgtatctgccggcaaaagttgcgcggtgatatcgttgccagcatcgacttctccacctaaatcttcacgcagcgcctgagcaacggcggcagggatatcgagattaatgcgttccagtagcgcgtcacgtcggtcgtctgggttataacggcgaggcggcatgataaaactccaaattgctaacgaatcataaggtagaaacatgctactctgaagcagctataagcaccactcaaaaggagactccgcatgttgccagataagggttggttggtagaggcgcgacgcgtcccttctccgcattatgattgccgtccggatgacgaaaaaccgtccttgctggtggtgcataatattagcctgccccccggcgagtttggcggtccgtggatcgatgcattattcaccggaacgatagatccagacgcccatcctttttttgcagaaatcgctcatcttcgtgtttcggcccattgtctgattcgtcgcgacggtgaaatcgtccagtatgtgccttttgataagcgtgcgtggcatgcgggcgtgtcaaactatcaggggcgggaacgttgtaatgatttctccattggtattgagctggaggggacggatacgctggcttataccgatgcgcagtatcagcagctagccgccgtgacgcgcacgcttatcgctagctatccggcgatcgccgacaatatgaccggacactgcaacattgcgcctgaccgcaaaacggaccctggccctgcctttgactggccgcgctttcgcgctttggtagccctctcgtcgcacaaggagatgacatgacgctgtttacgacattactggtgctgattgtcgagcgcctgtttaagctgggcgagcactggcagctcgatcatcggctggaggcgctattccgtcggattacgcatttttcgatgttgcgcacgatgggaatgacggcgatcgcgatggtggtgacttttctactgctccaggcgttaaaagggctgctatttaacgtgccgacgctggtggtgtggattctcctgggcgtgctgtgtatcggcgcgggcaaagtgcgagtacattatcacgcctggctgaaagcggcgtcccgtaacgatccgcatccttgcgaggcgatggccagcgagcttacgctgattcacggcgtgccgccggattgtaatgagcgtgaatttttgcgtgagctgcaaaatgcgttgttatggataaatttccgtttttacctcgcaccgctattttggtttatcgttggcggtccgtgggggccggtaacgctggtgggctatgcgtttttacgggcctggcagacctggctggcgcgctatcagacgccgcaccaacgtttgcaatccggcattgacgctattcttcatgtgctggactggattccggtacgtctggcgggcgtagtgtatgcattactggggcatggcgagaaagcgttgccggcctggtttgcctcgctggcggatctgcatacttcgcaatatcaggtgctcacacgtctggcgcagttctcactggcgcgcgaaccgcatactgacaaagtagaaacccccaaagcggcggtgtcgatggcgaagaaggcctcgtttgtggtggtggtgattattgcgttgctcaccatttatggggcattagtgtagcgttgtgccgatggcgctaacgcttatgctgcctacaatggaaaaatctgtaggcccggtaagcgttagcgccaccgggcagtgcaacggcttagatcgtatcggctggcggcacgccaaaatcaggcatcccgttttcgtcccagcgcacccgtttcagacgcgtatggcggttgggatcgtacaacggatcgccttcaatttcggtgtaatttctcgcgtggtacaccagtacattttcaccttccggcgtttgcgtaaagctgttgtgtcccggtccatactggcgattctcatagctggtggtaaagaccgggcgcggtgatttatgccagttggccggatcgcgcggatcgtcgtttacgttaatccacagtaatcccatacagtagttttcatcggtggcgctggccgaatagctgataaacagcttgtcgccatgcaccacgacggccggaccttcgttaacccaaaaaccccgacactcccagtcgtactctggcttactgagtcttaccggctcgcctttaatcgtccacggattttccagttcagccagataaatatttgagttaccggcaatatccggcgctttttgcgcccacagataccactgctttccctgatgataaaaagtggtggcatcgagggcgaaggtatcaaacggtgttttaatttgacctttctccgtccacttgccggtgagtgggtcggcatcggcgcactccagggcaaacatgcgatgctggaacattcccagcttatcaagcgcttgagtatgggtagcggcaaaatagatgtaccacttgccgttgatgcggtgcatttccggtgcccagatgagctggctcatcgggccgctttccggtttacgccagacgacaacggggtcggcggcgcgcaacccttccagcgaattagcccggcggatttccagcctgtcatattccggtacggaggcaataaagtagtaatcgctgccgtcgcgtaaaataaacggatcggcacgttgttcaataaacgggtttggccagtttgccatcaggctttccttacgctttcagcggcgttgagctcctgcaactcactcaattcgcggtaattagtgcgacgtttttccaaatcgtcctggatttttttcatcagttcacggtcaactttcagcagacgtaccacgcctgcggtaatcagatagccaacgccggggataacggtaaacaacagcataataccgttcatcgccgaggcgctttgcgctttggcgctggcgtcataaccgtaccaggagagcaaaaagccgaccatcgccccggcaatcgccaggcccagtttcaggaagaacaggttaccggagaagctgataccggtaatgcgtttgccggttttccattcgccgtaatcatcgacgtccgccatcagcgaccagtgcagcggggaagggatctgatgcagaatattgagcaggaagtagagcgccactatcatcacggtggctttcggatcaaagaaatagaacgcgcaggagaaaatcgccagcgcaatattggtccagaaaaataccttcaatttacaccagcgatcggttaagacttttgccagcatactgccgatcatcataccgaccacgccaagactaataaaaagcgtagcgaaatgggtgctttgtcccatcacccaggtgacgtaatacatggtcgccgccatacggataaaccccgggcagacgttacataaggtcaatagcagaatgcgtacccattgatcgtttttccacacatctttgaaatcattcttcatatcatcgtgcgtcggaatggcagggcggacgcgttcgcggacgctggcaaagcagaacagaaacatacccatgccgataatcgccagcacggtcatcgccaactgatagcctttggctttgtcgccgccgccaaaccagtccaccatcggcaatagcgttaacgatagcaacagcgtcgcgatgccgactaatacgaagcgataagcctgacaggccacgcgctcttttggatcgttagtgatcacgccgcccagtgagcaatagggaatattgatggcggtgtaggtcacggaaagcagaaaataggtgacgaaagcatagacaactttgctgttatagccccagtccggcgtcgtgaacatcagaacgctgaacagcgcgtagggaaatgcaatccacagtagccaggggcggaaacgaccatatttactttgggtacgatcggcaagcgcgcccatcaccggatcggtaacggcatcgataacgcgtactgaaaggagtaaaacaccgactaacgccggggcaagaccaaaaatatccgtataaaagtaattaacaaacagcatgatagcgccaaaaataatgttacatccggcgtcacccatgccatacccgattttctctcttaccgaaagtctgcccttatccattgagacttctccccatcagatgatggcggtaattattcgcctgcgagcttttttttgcgtagcaggatcacgccgctgatatggataaaatggttatacgtgggaaactgtgaggcagataacaccctccccggacggggagggcggaaaagtaacgccacgatcagtgggctttcaccgtttttgccgttttttctttacacaggtagccgacgcccaggatgagcagccataccggaatcagccacacggagatcgccatacctggcgtcatcagcataatgatcaataccgccgccataaacagcaggcagagaacattgccgaacggataaaacagggccgggaagcgggttttcacgccctgctgctgtttcgcgcgacggaacatcatatgggcaaggctaatcatcgcccagttaatgaccagcgcggagaccaccagcgccatcagcagtccgaatgcggactctggggccaggtagttgagcagcacgcacaacgcagtcacgacggcggaaaccaaaatggagctcaccggcacgccgcgtttgtcgacgttcagcagcgctttcggcgcatttccctgctgggccagaccgaacagcatacggctgttgcagtaaacgcagctgttataaaccgatagcgcggcggtgagaaccacgatattcagcgcattggcgacaaacgtatcgcccagctcatggaagataaggacaaatgggctggtatcggcggtgacgcgagtccatggcagcagcgaaagcagaaccgccagcgagccgatataaaaaatcaggatgcgatagataacctgattagtggctttggggatgctctgttccgggttatcggcttcagcggcggtgatccctaccagctccagtccgccgaacgaaaacataataatggccatcatcatcaccagcccggtccagccatgcggcagaaagccgccctgttcccacaggttgcgcacggtggcctgcggaccagcggtatcgctgaagagtaaccacgcgccgaacagaatcatagcgatgacggcgatcactttaataatggcgaaccaaaactccatctcaccgaacactttaacgttggtcaggttgatggcgttgataatcacaaagaaggctgccgcagaagcccaggtggggatctccggataccagaactggatatatttacccactgcggtcagttccgccatggcaactaatacgtacagcacccagtagttccagccggaagcgaatccggcaaagccgccccagtatttataggcgaagtggctaaaagagccggcgaccggttcttcaaccaccatctcccccagctggcgcataatcagaaaggcaataaagcctgcaatcgcatagcccaggataattcctggccccgccgactgaataacggaggcgcttcccaggaacaagcctgtccctatcgcgccgcccaatgcgataagctgaatatggcggtttttcaggccgcgcttgagctgctcgccgtgctgctgactgtccatcataaaacctcgtgtatcgggcgcggtttattcataacgcgcttattttgaacgatgcagtagtgcgtgtgtaagtttgcaattccgctttttgtattgatttatttacaagctcgttttttaaaatgtcacttcaactctttcgtcttgatcagaataatggtatgtggccgcgaatgcacctgctttgtgcaggggtgatgacgagttgcgtaaaaagaaagcacttgtaaatacctccttttattttcccttacagatgttaatttgtttttattcattatttatgcataaaaatgcatttaatctactgttgaatcggttcagatgagattttttatcgtttcaaatacgttaaatctacctcctggtgggtaaatttaacatttgtgcacagttacagttttgaaacatgatttctgtaaaattgttaaaatgtgcctcctttactgatttcaatcaaaacctgtatggacagaaggtgaatactttgttactttagcgtcacagacatgaaattggtaagaccaattgactccgggcaaatggcttaagacaggaaatcatggcctacagcaaaatccgccaaccaaaactctccgatgtgatcgagcagcagctggagtttttaatccttgagggaacattgcgtcccggagaaaaactcccaccggaacgtgaactggcaaaacagttcgacgtctcccgtccctccttgcgcgaggcgattcaacgtctcgaagcgaagggattgttgcttcgtcgtcagggcggcggaaccttcgtgcagagcagcctgtggcagagctttagcgacccgctggtggaactgctctccgatcaccctgaatcccagtttgacctgctcgaaacgcgccatgcgctggaaggcattgcggcttattacgcggcgctgcgcagcaccgacgaagataaagaccgtattcgcgagctgcaccatgctattgagctggcgcaagagtccggcgatctggatgccgagtccgaagccgtgctccagtatcaaatcgccgtcaccgaagcggcgcacaacgtggtattgcttcatctgctaaggtgtatggagccgatgctggcgcaaaacgtgcggcagaacttcgaattgctgtatgcgcgtcgggagatgctgccgctggtgagtacgcatcgcacccgtatatttgaagccattatggccggaaaaccagaagaagcgcgtgaagcgtcacaccgacatctggcgtttatcgaagagattatgctggacagaagccgtgaggagagccgtcgtgaacgcgctttacgccgcctggaacagcgcaagaattagttttttctggcagaacgttaaccagaagatgttgtgaataacgcgcaaaaatgtgcgcggcaactaaacgcagaacctgtcttattaagctttctcacgaaagtttaatgggacaggttccagataactcaacgtattagatagataaggaatacccccatgtcagaacgtttccaaaatgacgtggatccgatcgaaactcgcgactggctacaggcgatcgaatcggtcatccgtgaagaaggtgttgagcgcgctcagtatctgattgaccaactgctttctgaagctcgtaaaggcggcgtgaaagtcgcggcaggcgcaggggccagtaattacatcaacactattgccgttgaagacgaaccggaatacccgggtaatctggagctggaacgtcgcattcgttctgcgatccgctggaacgccatcatgaccgtgctgcgcgcgtctaaaaaagaccttgagttgggcggccacatggcgtccttccagtcttccgccacgatctatgatgtctgttttaaccatttcttccgtgcgcgcaacgaacaggatggcggcgacctggtgtacttccagggccacatctctccgggcatctacgctcgcgcgttcctggaaggtcgtctgacccaggaacagatggataacttccgtcaggaagttcacggcaatggcctctcttcctatccgcacccgaaactgatgccggaattctggcagttcccgaccgtctctatgggtctgggcccaatcggtgctatctaccaggcgaaattcctgaaatatctggaacaccgcggcctgaaagatacctctaaacaaaccgtttacgccttcctcggcgacggcgagatggatgagccggaatccaaaggcgcgatcaccatcgccacccgtgaaaaactggacaacctggtctttgttatcaactgtaacctgcagcgtcttgacggcccggtcaccggtaacggcaagattgttaacgaactggaaggcatctttgcaggtgctggctggaacgttatcaaagtcatgtggggcggtcgttgggatgaactgctgcgtaaagacaccagcggtaagcttatccagctgatgaacgaaaccgttgacggcgactaccagaccttcaaatccaaagacggcgcttacgtgcgtgagcacttcttcggtaaatacccggaaaccgcagccctggtggccgactggaccgatgagcagatttgggcgctgaaccgcggtggtcacgatccgaagaaagtctatgctgcactgaaaaaagcgcaggaaaccaaaggcaaagcgaccgtaatcctggcccataccattaaaggttacggcatgggcgacaccgcggaaggcaaaaacatcgctcaccaggtgaagaaaatgaacatggacggcgtgcgttacgtccgcgatcgtttcaacgtgccggttgccgatgctgatctcgaaaaactgccgtacattaccttcccggaaggttctgaagaacacaaatacctgcatgaacgccgtcaggcgctgcatggctacctgccaagccgtcagccgaacttcaccgagaagttagagctgcctcaactttcagatttcggcgcgctgctggaagagcaaagtaaagagatttccactacgatcgctttcgtgcgtgccctgaacgtgatgctgaagaacaagtcgatcaaagatcgtctggttccgatcatcgccgacgaagcgcgtactttcggtatggaaggtctgttccgtcagattggtatctacagcccgaacggccagcagtacaccccgcaggaccgtgagcaggttgcttactacaaagaagacgagaaaggccagattctgcaggaaggtatcaacgagctgggcgcaggcgcatcctggctggctgcggcgacctcttacagcaccaacgatctgccgatgatcccgttctacatctactactctatgttcgggttccagcgtatcggcgacctgtgctggcaggctggcgaccagcaggctcgcggcttcctgatcggcgggacttccggtcgtactacgctgaacggcgaaggtctgcagcacgaagatggtcacagccacattcagtcgctgactatcccgaactgtatctcttacgacccggcttacgcttacgaagtggctgtcatcatgcatgatggtctggagcgtatgtacggtgagaaacaagagaacgtttactactacatcaccacgctgaacgaaaactaccacatgccggccatgccagcaggtgccgaggaaggtatccgtaaaggtatctacaaactcgaaaccctcgaaggtagcaaaggtaaagttcagctgctgggctccggttctatcctgcgtcacgtgcgtgaagcagcacagatcctggcgaaagattacggcgtaggttctgacgtatatagcgtgacctccttcaccgaactggcgcgtgatggtcaggattgtgaacgctggaacatgctgcacccgctggaaaccccgcgcgttccgtacatcgctcaggtgatgaacgacgctccggctgtagcatctactgactatatgaaactgttcgccgagcaggttcgtacttacgtaccggctgacgactatcgcgtactgggtacggatggcttcggccgttccgacagccgtgagaacctgcgtcaccacttcgaagttgatgcttcttatgtggttgttgcagcgctgggcgaactggctaaacgtggcgaaatcgacaagaaagtggtagcggatgcgattaccaaattcaacatcgatgcagataaagttaacccgcgtctggcgtaagaggtaaaagaataatggctatcgaaatcaaagtaccggacatcgggacagatgaagttgaaatcaccgagattctggtcaaagtgggcgacaaagtggaagctgaacagtcgctgatcaccgtagaaggcgacaaagcctctatggaagtcccgtctccgcaggctggcgtcgtgaaagagatcaaagtctctgtcggcgacaaaaccgagaccggtgcacttatcatgattttcgattccgccgaaggtgcagccgacgctgcacctgctaaggcagaagagaagaaagaagcggcgccggcagcagcacctgctgcggcagcggcgaaagacgttcacgttccggatatcggcagtgacgaagttgaagtgactgaagtgatggtgaaagtgggcgacaccgtagaagctgaacagtcgctgatcaccgtcgaaggcgacaaggcctctatggaagttcctgctccgtttgcaggcaccgtgaaagagatcaaagtgaacaccggtgataaagtctctaccggctctctgattatggtcttcgaagtggcgggtgaagcaggcgcagcagcaccagcgaaagcggaagccgctccggctgcggctgctccagcagcagcgacgggcgtgaaagacgttaacgtaccggacatcggcggcgacgaagttgaagtcaccgaagtgatggtcaaagtcggcgataaagttaccgctgaacagtcgctgatcaccgtagaaggcgacaaagcctctatggaagttccggctccgttcgcgggtaccgtgaaagaaatcaagatcagcaccggcgataaagtgaaaaccggttctctgattatggtcttcgaagtagaaggcgcagcgcctgcggccgctccggctaaacaggaagcggcggcgccggctccggcggcgaaagctgagaagcctgctgccccggctgcaaaagcggaaggcaaatctgagttcgctgaaaacgacgcgtacgttcacgctactccgctgattcgccgtctggcgcgcgagtttggcgtcaacctggcgaaagtgaaaggcaccggtcgtaaaggccgtattctgcgcgaagacgttcaggcttacgtgaaagacgctatcaaacgcgcggaagctgcgccggctgctgcgggcggcggtatcccgggtatgctgccgtggccgaaagtggacttcagcaagtttggtgaagttgaagaagtggaactgggccgtatccagaaaatctctggcgcgaacctgagccgtaactgggtgatgatcccgcacgttacgcacttcgacaaaaccgatatcaccgatctggaagcgttccgtaaacagcagaacgccgaagctgagaagcgcaaactggatgtgaaatacacgccagtggtcttcatcatgaaagcggttgccgctgctctggaacagatgccgcgcttcaacagctctctgtccgaagacggtcagcgtctgaccctgaagaaatacatcaacatcggcgtggcggttgataccccgaatggcctggtggttccggtctttaaagacgtgaataagaagagcgtgaccgagctgtctcgtgaactgaccaccatctccaaaaaagcgcgtgatggtaagctgaccgctggcgaaatgcagggtggttgcttcactatctccagcatcggcggcctgggaactacccacttcgcgccgattgttaacgcgccggaagtggctatcctcggcgtttctaagtcggcgatggaaccggtgtggaatgggaaagagtttgtgccgcgtctgatgatgcctatctctctttccttcgaccaccgtgtgatcgatggtgctgatggtgcgcgtttcattaccattatcaacaatatgttgtctgacattcgccgtctggtgatgtaagcgaaaagccggcccgacggccggctttttttgataatctcatggagtttgtgaggttattagcgaaagcgataattcgtgatccgtttgttgtttcaaaattgttaacaattttgtaagatacgggcggatagaacgacccggtggatgatgggcgatcaagtaccccggaccgccggatacaaataaagaggtcatgatgagtactgaaatcaaaactcaggtcgtggtacttggggcgggcccggcaggctattctgccgctttccgttgcgctgatttaggtctggaaaccgtaattgtagaacgctacaacacccttggcggtgtttgtctgaacgtcggctgtatcccttctaaagcgctgctgcacgtagcaaaagttatcgaagaagccaaagcgctggctgaacacggtatcgtcttcggtgagccgaaaaccgatatcgacaagattcgtacctggaaagagaaagtgatcacgcagctgaccggcggtctggcgggtatggccaaaggccgtaaagtgaaagtggtcaacggtctgggtaaattcaccggggcgaacaccctggaagtggaaggcgaaaacggcaaaaccgtgatcaacttcgacaacgcgatcatcgcggcaggttctcgtccgatccaattaccgtttattccgcatgaagacccgcgcgtatgggattctaccgacgctctggaactgaaagaagtgccgaagcgtatgctggtcatgggcggcggtatcatcggtctggaaatgggtaccgtataccacgcgctgggttcagagattgacgtggttgaaatgttcgaccaggttatcccggcggctgataaagacatcgttaaagtcttcaccaagcgcatcagcaagaaattcaacctgatgctggaaaccaaagtgactgccgttgaagcgaaagaagacggtatctacgtttcgatggaaggcaaaaaagccccggctgaagcgcagcgttatgatgcggttctggtggcgattggtcgtgtgccgaacggtaaaaacctcgacgcgggcaaagctggcgtggaagttgacgaccgtggctttatccgcgtggacaaacagctgcgcaccaacgtgccgcacatcttcgctatcggcgatatcgtcggtcagccgatgctggcgcataaaggcgttcacgaaggccacgttgccgctgaagttatcgccgggaagaaacactacttcgatccgaaagttatcccgtctatcgcgtacaccgagccagaagtggcatgggttggcctgaccgagaaagaagcgaaagaaaaaggcatcagctatgaaaccgccaccttcccgtgggcagcttctggccgtgctatcgcttctgactgtgcagacggtatgaccaaactgattttcgacaaagaatctcaccgcgtgatcggcggggcgattgtcggtaccaacggcggcgagctgctgggtgaaatcggtctggcgatcgaaatgggctgtgacgcggaagacatcgcgctgaccattcatgcgcacccgactctgcacgagtccgtcggtctggctgctgaagtgttcgaaggtagtattaccgacctgccgaacccgaaagcgaagaagaaataatcttctgtaggtggcaatgcgccacccgatacaaaaaagcggctttacagccgctttttttatgcatggcaaatcagatgtgtcaaatgatggcgaaggataacgaaaccgcaaaatttatcgtttccgcagcagtacgtttttcaaagcttatgccgtcggtagtgcctttgtctgtcattttcgaccaactaattgtttcataagaaatacctctccttactttgtcatcatcctgaaattggtaacgctataaaataatagcgagctaattatgaggtttgatatatgaaactttttctgacaacagcagcgctaactgcgaccttgatttccggcatggcatttgccagcgatcccgtcatcccctgggcgactaacagcggcggtacggaaagcacgcatattgcggcaatgggcgaggatttgaatgcgcagcatcagcagatcacccacacgcatgaaggcgtatgggcggctaattccggcagcattcaggctgatgaagctgcgctgaccagcaacaagccgccggtacaaggccatccggaattaatgccgcatcagggctaatgatcatggcctggcgataacgccaggcgcttacgggttattcggcgacctgccactgtgcgtctggcgcaaaacgcgtgatagcctgaactttactctccgtctccttgcctaaatccgcctgataaatacgatcgtcctggttgaccataaaactcatcaccccggtttcgccgtaatgcatcggccaggccagaagcgccgcgccgtgaccgtcgttatcgctgataatacggaaatggtagccgtggtaaccctcgtctggcgctgcgggactaaagtttgggcctaacggactggggacgtcgcctgctttggttggccagtacaggccatctttttggccttcgctactgattatcctgtgcgcccagcgatggttttgtaagtaataatcctgctgcgcatcaacgtaagcatgcatggcctgtaaggtagaaagttcatttcgcccaatagtacgggtgaggatctcattcccggctgccgccatatcaaagcgccagccgccagtctctttcaccatgggcaccgggagctgccagtcttctcgtccgacattcaggtgcgccgtattgtctttttgtacaatgcgatggccttcgcgccagtcacgattgaagcgggccacggcctcgggatcggcaccttccggcggcagaaattgccgccagtcatcgcccagtagcgcggtaagctgcgtttcgttttttccggctaccgccgcggcgaaggcgctggcggccgcttccggggaggggaaccgttcctgcgcgtagcccagcaagggtaacgacagtaacagagcgcttaacataacctttttcattatctgctccggttaacggcgatgaaattcatgatgttcagaaaaatgttcccgcgcggcggcgcgttgctcggtgtttaagtgactgccgcgacggctttccaggccgcgtagctgttgcgattgccatgacggcgatcgactgtcgttcccgctaaacacattggcgtgcatattctggcgaaatgcctgacgctgctgcggcgtagaggattcaatacgctggcgggcggtgtctctctgctgttgtgaaacagggtgctgctgggctttagccttcagctcggaacgatgctgctgcgtggtggatttattcagtgtctgctgcgccgcctcgcgacgactgctgttttgtgttccgtcatagccacggtaattattacgctgggcaatttgatttaactgctgcgatgccgccttacgctgggcatcgcgggtgcctggcgctggcaaagaagcgttggccgtatggctgcgctgttgaaattgcgtcatggccgcctggcgctgactgtcgcgagacactggcgcttgctgcgttgcgcttaacccgccgctaacattggtgggatggaaccgttgcgcaacggtattattcggataggggacgccattgcgccaggcgggattatgctgccagcccatcgtttggcccggcaggttttgcccggatatccggttgaaattattgacattgatgttgatattatcgccattatgttgataaccgttaccaccatgatggtaatcatcatcatggtggtcgtcgtcatggtgggtcatcatcccagtctatgctgctgaacaacgcataggtggtggcgacgcccagactataaccaaaacctttaacaaaactgtcggcaaactgctgccccggagggggcggtaaatacaccggcggataagcggtattgggccaggcgccatacaccgtcgcggggttatagttcggcacgtacaccacctgcggattcgcgggttcaatttttataacggtcgacggtgtcgctggcgtactggcggatgtggtggttgtcgtcgtgacggcggtagaagcgctggacttcggcacgctggtgacggtttgctgtggcgtggattttagcgaaccggtttgttgagcgagcagacgcagcctttgcaccgcatccatcacatcctgtggctgggctaagaacgcatcgcccaggttttgcacccattgcggattctcgcccataagcgccatcaactggggaaaggcgaccagcgatttgacgctggggtcccacggttggctggccaccgcctgaatagcggcatcgccctgcagcgtagggttatcgcgcgaccactggacggcctgaactacgttcgccgggtaggtggaggccatgagcacctgcgaaagcagggcatcgggataaagcgcgacaggcgcgacccattgatcaatttgcgcagtggtaaaggtcgttttcgcgacaggcgcgggcacagcggtctgcgttggctcagaggcgggagctgccgcctgcgcgggcgcttcgggagcgcagcttttaacatacagtacgcccgaagcggcaaataacccggcactgcacacaagggcaatgagatggggtttaaagggcaacgtcattttatctctcccgattccagagaatcgctatggtcattatgcctgccgccgacggggtgcagtttggcgtgagtataaagggacgatagtttaatttttagctaatgttgggatcggtaacgttacgtgacgatcaaagcacgaaatgaggtaagcatttatggctgcagctcccgtctcagtagagcattagaccatccttaacgattcagccacttttttatgttgcttttttgtaaacagattaacacttaaagaaaatcctgttattgtgccttatgcggtaccgggcatttaccctactaactactgtctcacaggagcgtgaagagaatcgcccatcaacaaaagcgccgcattatgacaatgagagcgaggagatatcgtcgtgctagaagaataccgtaagcacgtagctgagcgtgctgcccaggggattgtgccaaaacctttagacgcaacccaaatggctgcgcttgtcgagctgctgaagaccccgcctgtgggcgaagaagaattcctgttagacctgttgatcaaccgcgttcctcctggcgtagatgaagccgcttatgttaaagccggttttctcgctgctgtcgcgaaaggcgacaccacctccccgctggtctccccagaaaaagccattgaactgctgggcaccatgcagggtggttacaacattcatccgctgattgatgcgctggacgatgcgaaactggcgccgattgctgccaaagcactgtcccacaccctgctgatgttcgataacttctacgacgtagaagagaaagccaaagcgggcaatgaatatgccaaacaggtgatgcaatcctgggccgacgccgaatggttcctgagccgtccgccgctggcggaaaaaatcaccgtcaccgttttcaaagtgaccggcgaaacgaataccgacgatctctctccggcgccggatgcgtggtcgagaccggatatcccgttacatgcgcaggcgatgctgaaaaacgcccgtgaaggcattgagccggatcagccaggcgttgtcggcccgatcaaacaaatcgaagcattgcagaaaaaaggctacccgctggcttacgtgggtgacgtggtgggcaccggttcttcccgtaaatccgcgaccaactccgtgctgtggttcatgggcgatgacatcccgaacgtgccgaataagcgcggcggcggtctgtgcctcggcggcaaaattgcgcctatcttctttaacactatggaagatgcgggcgcgctgccgattgaagttgacgtttctaacctgaatatgggcgatgtgattgacgtctacccgtacaaaggcgaagtacgcaatcatgaaaccggcgagctactggcaaccttcgaactgaaaaccgacgtgctgattgacgaagtgcgtgccggtggtcgtattccgctgattatcggccgtggcctgaccaccaaagcgcgtgaagcgctggggctgccgcactcagacgttttccgtcaggcaaaagacgtggcggaaagcagccgtggcttctcgctggcacagaaaatggtcggtcgcgcctgtggtgtgaaaggtatccgtccgggcgcgtactgcgaaccgaaaatgacctccgtcggttctcaggatactaccggcccgatgacccgcgacgagctgaaagacctggcctgtctgggattctccgccgatctggtcatgcagtcgttctgtcacaccgcagcctatccgaagccggttgacgtcaccacgcaccacacgctgccagacttcattatgaaccgtggcggtgtctctctgcgtccgggcgacggcgtgattcactcctggctgaaccgtatgctgctgccggataccgtcggtaccggcggtgactcccatacccgtttcccgattggtatctctttcccggcgggttctggtctggtggcgtttgccgccgcgaccggcgtgatgccgctggatatgccggaatccgtgctggtgcgcttcaaaggcaaaatgcagccgggcatcaccctgcgcgatctggtacacgccatcccgctgtacgccatcaaacagggcctgctgaccgttgagaagaaaggcaagaaaaacatcttctctggccgcatcctggaaatcgaaggtctgccggatctgaaagtcgagcaggcgtttgagctgaccgatgcttccgccgagcgttccgctgccggttgtaccatcaagctgaacaaagagccgattgttgaatacctgacctccaacatcgtcctgctgaagtggatgatcgccgaaggctacggcgaccgccgtacgctggaacgtcgtatccagggcatggaaaaatggctggcggacccgcagctgctggaagccgatgctgacgcagagtacgcggcggtgatcgacatcgatctggcggatatcaaagagccaatcctctgtgcgccgaacgatccggacgacgcgcgtctgctgtctgacgtgcagggcgagaagatcgacgaagtgttcatcggctcctgcatgactaacatcggccacttccgtgcagccggcaagctgctggacaaccataaaggccaactgccgactcgcctgtgggtggcgccgccaacccgtatggacgccgcgcagctgaccgaagaaggttactacagcgtgttcggtaagagcggtgcgcgtattgagatccctggctgttccctgtgtatgggtaaccaggcgcgtgtggctgacggtgcgacggtggtttccacttctacccgtaacttcccgaaccgtttaggtaccggtgcgaacgtcttcctggcttctgcggagctggcggcggttgcggcgctgatcggcaaactgccgacgccggaagagtaccagacctacgtggcacaggtggataagacggcggtggatacttaccgttacctgaactttgaccagctttctcagtacaccgagaaagcagatggcgtgattttccagactgcggtttaatttacattttaagggggctaattgccccctttttattcatattatatgtttctgtattttctatctttttaagatgttgcgtatttttattttagcttcttcatattgtaggttttcctctcttaagtatatatgaacagctttgtgacaatttgggcaaagtaatgcaaagtcagttttcaatattctgtgctcaccggtaaaagtatgtattggtattttgtggtgggcctcaatatagtttttaccatatttatctaagaatttaatctcacaaatatcacaaacccattgcgagttatcttttatttcatctattatttttctattccgctcagataacatatgagttatgtatttaatttttccttcagtgtgctcgtttttatacaaaatgacgtcatcattgtcactattcttatcatttagacttgggaaacttatcattttttctaagatgactgctttttctagtatgtctatgattttaaagcatccctgaaattcccatttgttagatgaatcagtaaataacaaaattggatagttgcttatcggttggttaattagaacccggttcgcagaatcattaaagttaatgatgccttttgctgctttaaatgagtaagagtatatggttttttcattatttttccagccatcatcagcgtaagaaccatcctttgtttttattattactgctttgatattgggatgttctcctatccaatttattccttgttgaggtgtgtttttaattatccaatccttgccttcccaattttcactgtcatcttttttagatttttggatgagctgggataaattttgtttgttaattatatctgagatagttaatgaaagaagttgagatggatattgaataagctttaaggttcccattatattcctatactataaagtgtataataattatcattatacatgctagcagtgtaaatttactacattcataatgatagcatgggacgatgctacttgtggaaccagaatgcagataacccgatcttcttattgataaatttacgacaattagacgtatccactttttttcctctacatagctgcgataattacccataggtacaatgcagcggtgacgcattgcctttgtagaggaacagatcatggattacgaatttctgcgcgacgttaccggaggggtaaaagtacgaatgtcgatgggccacgaggtggtcggtcactggtttaatgaagaggttaaagacaacctctcgctactggatgaagtagaacaagccgcgcgtacggtcaaaggcagcgaacgctcctggcaacgagcagggcatgaatacacgatctggatggacggcgaagaagtgatgattcgcgccaatcaactggatttttccggcgatgagatggaagaggggatgagttattacgatgaagagagtttatccctgtgcggcatggaggattttctgcgggtcgtcgccgcgtatcgggaattcgtcagtaaagcctgaccctctcttcgttattgtcccacaacgccagtcgacggacagttgggggcggtagtggaaacgaagtcgccaaacattccagccgggagtatcccggcttttttatagcagaatgattttttgatttttattaatcattttaaaactgtgatctgacgcgtttgtgatcttaatttgattgaatataatcgttatgattttattcaatcacaacaagcaacaggcggtaagaccatgaacatcaaaaaagcaatagagcgcgtacccggcggcatgatggtcgtaccgctcgttattggcgcagtcattaacaccttcgccccgcaggcgcttgagatcggcggttttaccactgccttatttaaaaacggcgcggcaccgctgattggcgcttttctgctgtgtatgggagccggtatcagtgtgaaagccgcgccccaggcgttattgcagggcgggacgattacgctcactaagttgcttgtcgccatcggcattggtctgggcgtggagcatcttttcggcgcggagggtatttttggcctgagcggcgtggcgattatcgcggcgatgagcaattcaaatggcggactttatgctgcgctggtaggcgaattcggcaatgagcgcgacgtcggcgctatctctattttgtctcttaatgatggccctttctttacgatgattgcgctgggcgcggcagggatggcgaacattcccattatggcgctggtggcggtgctggttccgctggttgtcggcatgatcctcggcaatcttgatcctcatatgcgcgattttttgaccaaaggcggcccgctgctcattcctttctttgcttttgcgctgggggcgggcatcaatctggaaatgttactgcaaggcggacttgccggaattctgctcggcgtgctgacaacgttcgttggcggtttctttaatattcgcgcagatcgtctggttggcggaactggcattgccggggcggcggcctccagcaccgcgggtaatgccgttgcgacgccgctggctattgcgcaggccgacccttcgctcgccgaggtggccgctgctgccgctccgctgattgccgcctcggtgatcaccacggcaatcctgacgccagtgttgacctcctgggttgcgaaaaaacaggcgcgtcaggcttctttggagaaaaacgcatgaaaatgatagttatcgccgatgattttaccggatcgaatgataccggcgtccagttggcgaagaagggggcgagaacggaagtcatgttgagcgcgtcgcaaaaaccgtcccgccgcgccgatgtgttagtcattaacaccgaaagccgggcgatgcccgcagatcaggcggcatctgccgtttatgccgcgctttcgccgtggtgtgagacatcgccagcgccgctggtgtacaaaaaaatcgactccacatttcgcggcaatatcggcgccgaagtgacggcggccatgcgcgccagtcagcgaaaactggccgttatcgccgccgcgatccctgcggccggacgcacgacgcttgaaggaaaatgtctggttaatggcgtcccgctactggaaaccgaatttgccagcgatccgaaaacgcccattgtctcttcccgtattgccgagatagtggcgttgcaaagtgagatccctgtgtatgaagtctttttgcaggatgtccgacgcggcgggttaagcgccttacttacggcttatgcggctgagggcgaagggattatcgtcgtggatgcggtggaagagcgggacctgacgttgattgcgcaagcggcgtgtgaacaaccgtcgatgccgctgctcgtcggcgcagcgggtctggcgaatgcgttgccggttgaactttttatgcaagaccggcagcggctgccggtgctggtggtggccggttcgatgagcgaagccacgcgacgtcaggtggataatgcgctgtgccggggacgtgcggaggtcgtggatatcgatgccgcgcgcatggtgtcggatagcgcggaacaggaaatcgcgtctgtcgtagagcaggcctgcgcgctgttaagtcagcatcgacatacgattttacgcaccagccgtcgcgcagaagatcgacagttaatcgacgcgttgtgcgaaaaatccgcgatgagccgtcagcaattgggcgagcgactgagccagcggcttggcgtcgtcacgttaaacattatcgagcaggcgcggattggcgggctgtttctgaccggcggcgatatcgctaccgccgtcgccggcgcgcttggcgctgaaggttatcgcattcagagcgaggtggcgccctgtattccctgtggaacgtttgtaaacagcgaaattgacgatctgccggtcattaccaaagcgggcggattcggttcagacagtacgttgtgtgacgcgctttattatattgaggagatgtattgtggagactaaaaccgttgccattaccatgggcgatccagcgggcattgggccggaaattattgttaaagcgctaagcgaagacggtctcaacggcgcgccgctggtggttattggatgcctcgcaacgttgaaacgtttacaggcgaagggcatcacgccgaacgtcgagttacgggccattgaacgggtcgccgaagcgcgttttgcgcccggcatcattcatgtgattgatgagccgctggcgcagccggaggcgctggaggccgggaaagttcaggcgcaggcgggggatttagcgtatcgctgcgtgaagcgcgccaccgagttagcgttacggggcgacgtacaggctatcgctaccgcgccgctgaataaagaggcgctgcacctggcggggcacaactatccgggccataccgagctgctcgcgaccctgacccatagccgcgattacgcgatggtactttacaccgataaactaaaagtgattcacgtttcaacgcatatcgcgctgcgtaaattccttgatacgttaagtaccgcgcgtgtcgaaacggtgattggcattgctgatactttcctcaagcgtgtgggttacgttaaaccgcgtatcgccgtggcaggcgtgaatcctcatgcgggcgagaatggcctgtttggcgatgaagagacgcgtatcctgacgccagccattaccgatgcccgcgcaaaaggtatggacgtttatgggccgtgcccgccggatactgtatttctccaggcttatgaggggcagtatgatatggtggtggcgatgtatcatgaccaggggcatatcccgttgaaattgcttggcttttatgatggcgtgaatatcaccgcggggctgccgtttattcggacctctgctgatcatggcaccgcatttgatatcgcctggacgggaaaagcaaaatctgagagcatggccgtatcgatcaaactggcaatgcaactggcataattccctgttatgaaaggacaacaccgtctggatctcattgtggcgtatctgaaaaaccatacgctggttacggtagaacagctggttgaggcggttgacgcatcgccagccactatccgtcgcgatttgatcaagctggatgagcagggcgtgatcagccgtagtcatggcggtgtggcgctgcgacgttttgaacccgcccagcccaccaccaatgaaaaacaactgcgatcgcccgctgaaaaacgggcgatcgcacgcgttgccgcatcgctggtcaatgctggcgatgccgtcgtgctggatgccggtacgacaatgatggaactggcgaaatgcttaacccatcttccgctgcgggtcatcaccgtcgatctgcatattgcgctgtttttagctgagttccggcaaattgaagtgacgattgtcggcggtcgtatcgatgacagcagtcagtcctgtatcggtgagcatgggcgcaagctgttgcgcagcgtttacccgaacatcgcgtttatgagctgtaattcatggggggtaaaaacgggcgtgacgaccccaacggaagataaggccgggcttaaacaggagattattgctaatgcgcagcgcaaagtgttgctggcggacagcagtaagtatggcgcgcattcgctctttaatgtggtgccgcttgagcgctttaatgacgtgattaccgacgtcaatctgccgccgtcagcgcaggttgaactgaaagggcgcgcttttgcgctaacgctggtgcagccggagtgacagcgccgtcaggcgctgccagtggtgaatcagaccgcagaaatattgcggccgtagtaaatctcgcgcatctctttccacagcgcggcggtgatctcctggcgttcggtttcagtgagatcttccggtttggtgtgaaacatgtagtgcttaagatcgaactctttaagcagcatcttggtatggaaaatattttcctgatacacgtttacatccaccatgtcatacagcgacttcatatcttccgacataaaattctgaatagaattaatctcatgatcgataaagtgcttcataccgttgacgtcgcgtgtaaagccgcgcacgcggtaatcgatggtgacgatatcggactctagctggtggatcaggtaattgagcgcttttagcggtgaaatcaccccgcaggttgacacttcgatgtcggcgcgaaaggtgcatagcccgccttccggatggctttccggataggtatgcacgcagatatggctcttatcgaggtgcgccaccacggtttccggcagcgggccgggatgttcggtttgatcgataagtttcgggtcgatcggctcttcgctcaccagaatcgtgacgctggcaccctggggttcataatcctgacgggcgatgttcaggatgtttgcgccgataatggagcaggtctccgacaggatctcggtcagtcggttggcgttatagagttcatcgatataggcgatatagccatcgcgctcttctgcggttttggcgtagcagatatcgtaaatacaaaaactcaggcttttcgtcagattgttaaagccatgcagtttcagctttttcaatttttatcacctccttaacgtcactgtgcggacagtgcgtcatgtagatattgcggtagcgcaaatgcagcggcatgaatagccgggttgtaatagcgacatttgaggccggcggcatgaaaacgtgcctgaataatttcgctcgacaggtggcgaagagcgtcgttgtccgtcgcccaggcgaaggtcataatgccgccgtaataggtcggaatcgccgcctggtagaagccgacatcgctgaagtaatgactcagcttgcggtggctgtcgagcgcttcatcctgctgcaggaagcacacgccgttctgggcgacaaaaatgccgcccggattcaggcaacgcttacagccttcataaaaggcggaggtaaacaggctttcgccggggcctatcggatcggtacagtcggaaatgatcacatcaaaggtctgatgggtttgattgacgaaattcacgccgtcgtcgattaccagcgtaaagcgcggatcgtcgtagctgccggcattgtggttgggtaaatactggcggcaaaacgagactacgccagcgtctatctctaccatggtgatggtttcgacgtttttatgccgggtaacttcacgtagcattgcgccgtcgccgccgccgataatcagaacgtgtttcgcatgaccgtgcgccagcagcgggacatgggtcatcatttcatgataaataaactcgtcgcgttcggtggtctgtaccacgccgtccagcgccatcacgcggccaaaagcggcgttttcaaagatgattaaatcctggtgatcggttttttcatgatacagaacgttgtctacggcaaagtactgaccaaactggtcgtgtagcgtttcatgccacatcgtattttcggccattggctgatacctccattgttaacacccgtaaaaaaagggcgcaacatcatagctaacaatgaccgtggatgcacggtcattatttcagcaataggatcacggaggattatttaacgtaggctaacaggctcagagaatcgcgggccagagctttgcattttttagcgaccggaataccgatgccgctaagatcgcggtagctgtcttcgcccaacgatttcatatcgaaggtgtcgtagttactcaggtcccactgattttgctgggcaaaaaagaccagcgcacggcgaatctggctgttgggtaaattttggtaaccacagtcatttttcagaaaaacgaaaactgccgttaaatcggccatatcttcagcttcggattcagtaagcgcatagctatttgcgcataaggccatcaggctgccaaacaacacgggtctgaaaaacgtcttcattgcttctaccacggcatcagggaaagtcaacgttagcatactgagaacgtagcgacgacttttattatcaggattggtcgcggcgttttcattcttattgtattgctgtcaggaatggtaaagacgtgttgctggcttgaccttcccgttagggcagggtctaagcttagacacccgcctgttcattataaggaaatgattatgttacgccgtgatttcttaaaatattcagtggcgctgggggttgcatcagcgctgccgctgtggagccgcgccgcttttgccgccgaacgtcccgcgttgcctattcctgacctgttaacggcagatgcgagcaaccgtatgcagttaattgttaaagccggacagtcgacattcgccggtaagaacgcgacaacctggggctacaacggtaatttgctggggccagcggtacagcttcacaaaggaaaaagcgtgaccgttgatatccataaccaactggccgaagacacgacgcttcactggcatggtctggagattccgggcatcgtcgacggcggcccgcaggggattattcccgcaggcggaacccgcacggtgacgtttacgccggagcaacgcgccgcgacctgctggattcatccgcacaaacacggcaaaaccgggcgccaggtggcgatgggccttgccgggctggtgctgattgaagatgacgagattcgcaaattgcgcctgccgaaacagtggggcatcgacgatgtgccggtgatcattcaggacaaacgcttctccgccgatggccagattgattatcaactggatattatgaccgccgccgtcggctggtttggcgatacgctgctgaccaatggcgctatctatccgcagcattccgcgccgaaaggctggctacgtctgcgcttgctaaatggctgtaatgcgcgctcgctgaatatcgccgccagcgataatcgcccgctttatgtgatcgccagcgacggcggcctgctggcggagccggtgaaagtcaccgaactgccgttattaatgggcgagcgttttgaagtgctggtggatatcagcgacgggaaagcctttgatctggtgaccctgccggtcagccagatgggaatggcgatcgctccgtttgataaaccgcatccggtgatgcgtatccagccgctgcggattaccgcctccggtacgctgccggatacgttgacgacgatgccggcgctgccgtcgctggaagggctgacggtgcgcaacctgaaactgtcgatggacccgcgccttgatatgatggggatgcaaatgctgatgaagaaatatggcgctcaggcgatgagcggcatggatcatgacagcatgaacgcgcatatgcagggcggcaatatggggcatggcgagatggatcatggcaacatggatcacagcgggatgaatcatggcgcgatgggcaatatgaatcacggcggaaaattcgacttccataacgctaactttatcaacggccaggtcttcgatatgaacaaaccgatgttcgcggcgcaaaaaggccgacatgaacgttgggtgatttccggcgtgggtgacatgatgctgcatcctttccatattcatggcacccagttccgtattttgtcagagaacggcaaagcgccagcggcgcacagaacgggctggaaggatacggtacgcgttgagggcggtatcagcgaagtgctggtcaagttcgatcacgacgcgccgaaggaacatgcctatatggcgcactgtcatctgttagaacatgaagatacgggaatgatgttaggatttacggtctgaccgatgtctgtgacgcaggccgggtaaggcgaagccgccacccggcacaatgcccggcatacgccgggcattaatggttatttcgcgtcgtcaggcaaagcataggccacgatatagtcgcccatcttcgtaccaaacgaaccgtggcctccggcagaaacgaccacgtactgcttaccgtttacctcataggtcataggcgttgcctggcctccggcgggtaaacgtccctgccacagtttttccccgttgctcatgttataagcgcgcaggtagttgtcggcggtcgcggcaatgaacagcacattaccggcggttgagattggcccgcccagcatgggcatccccatgttgaacggcaccggaaccggcatcgggaacggcatactgtcgcgcagcgtccctatacgtttcttccacacgatttcattggtcttcagatccaacgcggaaatatagccccaggccggttgtttacacggcaggccaaacggcgaaaggaacggattcagcgtgacgccgaatggtacgccgtactgtggctgaatacccgcttctgtaccggtacctttcgcgtctttcggcggctccattggattacccgggccgcgtgggatcagcttcgagacaaacggcagcgccatcgggttagcgatagcgacctgacggtctggatcgacggaaataccgccccattcaaacatccccaggttgccagggaataccaatgtcccctgctcggacggcggggtgaagataccttcatagcgcaactggtggaacatgacgcggcacaccagttggtcgaacatggtcgcgccccacatatccgcgccggagagatcttttttcgggcggaaggttaaatcagagaacggctgagttttggcgacgtaatcgccttttgccgcgccctgcgggaccggtttttccggggcgggcacgaccagctcgccattacgtctgtccagcacaaagatattaccggttttcgctggcgcatagataaccggaacggtagtaccgtcaacggtaatatccgccagcgtcggctgtgccggcaggtccatatcccacagatcgtgatggacggtctgataactccaggccagtttcccggtggtggcattcagcgccaggatggagctggcataacgctcctgctccggcgtgcggttaccgccccagatatccggcgtggtcacgcccatcggcagatagaccagatccagtttcgcatcataggcggcaggcgcccaggagttcggcgagttaaaggtaaaagcgtgctcatcggctggaatcgcgttcggatctttcgcccccggatcgaaggcccacatgagtttaccgctattaacatcaaaacctcggataacgccggacgtttcgcgggtagagaagttatccgtgaccgaaccggcaatgacaattgttttatcggtgataatcggcggcgacgtcggttcatacagtcccggtgtggtatccggcatattggtttgcagattcaggacgcctttgttggcgaaggtttcacacagcttgccggtttcggcattcaccgcgaaaaggcgaccgtcgttgaccgggaggataatacggcgcggacagtcggcgatgacctccggcgaggcggtatccgctttggcctcatgataagagacgccgcggcaggtcacatgctggaaagacgaatcggtcttcaactgaggatcaaaatgccacttctctttaccgctggcggcgtccagcgcgaacagacgctggtgagctgtacacagataaagcgtatcgccgacttttatcggggtcacttcgttggtgatttcacccggatcgttgggctgtttcagatcgccggtgcggaagacccacgcttctttcagttggtgaacgttatccgcagtgatctgtttcagcggcgaatagcgttggccttcctgattgcgcccataggccggccagtcttcgtcggcgatcgacgaacttgttgcggcgggcgtggcgtcggcgcgaagcgtaccgttgatctcctgcgggtcgttgaagccggcccaggtcagaatgccgccgctaatcagcaacgccacgaccagcgccgccactgcgccactggaaggaaccaccagccgatgccagacaaacggtaatattagccagatgccgaaaaacaccaggatatcgctacgcggcgtgagcgcccagaagtcgaacccgacttcccacacgccccaaatcattgtcgccagcagcagggcggcatacagccacagtgcggcacgtttactgcgccatagcaatccggccacaaccagcatcacgaggcccgcgatggggtagtaccaggaaccgccaatagcaaccagccagacacctccgataagaagatacagcccacaaagtgctgcaaagagggccgtcagcgtcacgagtaatcgtggcgatcgtgcgttattttctgccataaaaagacaccatcccaaattgttaattttttagtagcaattaagtataggaattaacatgtgtgatcgtcatcacaaaatgagctttcttatcaaatgccgcgaatgaatacgtttgctgttatactgcgtgccttgcgcgtcaatgcggcgttattagtcaccggcattgagtgatttgtttttaaatcatatggttataaatatgaaacatactgttgaagtcatgatccccgaagcggagatcaaagcacgtattgccgagttgggtcgtcagattaccgaacgttataaagacagcggcagtgaaatggtgctggtaggtctgttgcgtggctcatttatgtttatggcggacctgtgccgtgaagtccaggttcctcatgaagtcgattttatgaccgcctccagttatggtagcggcatgtccaccacccgcgacgtgaaaatcctcaaagatctggatgaagatattcgtggtaaagacgtgctgattgtcgaagacattattgattccggtaatacgctgtcgaaggtccgtgaaatcctgggcctgcgcgagccgaaatcgctggcgatttgtacgctgctggataaaccttctcgccgcgaagtggacgtgccggttgagttcgttggcttttcgattccggacgaatttgtagtcggttacggtatcgactacgctcagcgttatcgccatctaccgtatgttggtaaagtggtgctgctggacgagtaagcgcagaaatgccggatggcgtcgctaaagcgacttatccggcctatagctaatggcttattggtggggaatgtatttcagacttagggcggaaatacccttatgatagccgttctccagcgtttctctgttggtggcggtgacgtcaagatcgcgcagcaggccatcattgatactgtacgcccagccgtgaatggtcacattctgaccgcgtttccacgctgactgcataatggtggaatgccccaggttatagacctgttccatgacgttcaattcatagagcgcgtccagacgttgctcttcgggcatttttcccaacagcgagctatgtttaagccagatgtcgcggatatgcagcagccagttattaatcaagcccagctcagggttttctaccgcagccttgataccgccgcaaccggagtggccgcaaatgataatatgctcaacttccagaacatctaccgcatactgaaccacggagagacagttcagatcggtgtgaataaccaggttagccacattacggtgaacaaacaattcgcccggttcaagcccggttaaacgctctgcgggaacgcggctgtcggaacatccaatccatagaaagcgcggtttttgcgcttgcgccagtttctcaaaaaatccggggtcctcttccaccagcatttttgaccatagtgcattgttgctgatgagtgtatctatgtctttcatggaagttaacgacctgtaaccaaataagtgcgttgggctaatatagggcaactccgtaattatttaaaccatatataaagtgtaagaacgtaaagtaagtgagaatttatgaccattgcgctggaacttcaacaacttaaaaaaacctatcccggcggcgttcaggcgttgcgcggcatagatttgcaggtcgaagcgggggatttttacgcgcttctggggccaaatggagcagggaaatcgaccaccatcggtattatcagctcattggttaataaaacgtccgggcgcgttaacgtttttggttacgacctggaaaaagacgtggttaacgccaagcgacagcttggactggtgccacaggagtttaactttaacccgtttgaaacggtgcaacagatcgtagtgaatcaggcgggttattacggcgtggaacataaagaggcggttttacgtagcgaaaagtatttaaaacagctcgatctgtgggaaaaacgtcatgaacgcgcgcggatgctctccggtgggatgaagcgccgcctgatgatcgcccgcgcgctgatgcatgagcctaaactattgattctcgatgagccgacggcgggcgtcgatatcgaattgcgtcgctcgatgtggggattcctgaaagatttaaacgccaaaggcaccacgattattcttaccacccactatctggaagaggcagaaatgctgtgccgcaatatcggtattattcagcacggcgagctggtggaaaatacctccatgaaaaatctgctttcaaagctgaaatcggagacgtttattctggatttagcgccaaaaagcccgctacctaagcttacgggttatcaatatcgtctggtggatacctcgactctggaggtggaagtgttacgcgagcagggggttaacagtgtctttagccaactgagcgagcagggggttcaggtattaagtatgcgtaataaagccaaccgtctggaagaactgtttgtgtcgctggtgcatgaaaaacaaggagatcgcgcatgatgcagctttactgggttgcccttaaaagcatctgggcgaaagagatccaccgctttatgcggatctgggggcaaacgctggtgccgcccgtcatcaccatgacgctctattttattattttcggtaacctgattggttcgcgcatcggcgaaatgcatggttttagctatatgcaatttattgtgccgggcctgattatgatggcggtcattactaactcctacgcgaatgtcgcgtcgtcattttttagcgccaagtttcagcgcaatattgaggaactgctggtcgcgccggtaccaacgcacgtgatcatcgccggatttgtcggcggcggcgtagcgcgcgggctgtgcgtagggattctggtgacggcgatttcgctctttttcgtgcctttccaggtgcattcctgggtatttgtcgcgctaacgctgattctgaccgcgattctgttctcgctggccggactgctgaacgccgtgtttgcgaaaacctttgacgatatcagtctgatcccgacctttgtgctgacgccgctgacctacctcggcggggtattttactcgctgacgctgctgccgccgttctggcaagggctgtcgcacctgaacccgatcgtctacatgatcagcggtttccgttatggttttctgggtatccatgatgtgccgctggtgacgacgtttggcgtactggtgatctttatcgctgctttctatctgctgtgttggtcgctgatccagcgcgggcgcgggttgcgcagttaagcgctgactggggagatggggcgttgggttgcgcttcgcttcacttcatctacgggtccgtaatatcaatgggttacgggtcggtaggtgaggcttgtcgaaacccaacgcttctctcagcgaatctgaatctccagcgtggcggtggcctggtattctccggtgtggggaacatgtccggtggtattgaccggcgcggcggtgaactcggtgctgcctctaccgtcagtgtaatcttcaatcggcaattcggcgctgccgccgggaacgatggtattatcgtatttatcggaaatccgtatccccaaattctcattgtcagttttcaggtagtccgggttgtgcggatcggttgcgccatttaatgacattgacaggttggtgccgtccgccacgttgctacaggtaaagtttacctgagtggtgacgtgcgagttctgcgggctgtcgccgaggtgacgaatatctttgccctcaatatccggtagcctgacctcgataacctgcccggcgttgatggagcaggactgcggcacggtaatggtcccggacatggtgacgtgcgccatcggtggaacggaagggggaatattatctccgctgctgcccggcgtttttgacaaatagagattcataatcgtcgtctcaggaatggtgatttcacctaccaatgggtgagtaatataaatacgcacgttacccttattccctgcggacattttgtttatgtccgcgcccgtacacccgcctgcggtggggtcctgattactgatcgctgaaaagggaacggggatatactgtttcaggttaccgacgatgtaggtttccgtaccaatctccagcttacccgcgaccagaacataaaaatccatctgttgcccattgctacccgcttcgctgtacgttcctttttgtgttaaatcgccggtcgtggcggtgaaatagttaacgccctgataatctttattatcgcagtcgcacctggcgctgtattcgccgccgaccgaccaactctctttgactattttccctgcctggttctcatccgtatcggtaatggtctggtcaaggggaaaaaagaaattatgcgtgccgctggtgggttgacaccagccgcttccgttgcccatcgttccgtctgccagcgcatggcctgaaaatagcgatagcgccagcagcatccataaattcttcattgtgttcctcactggcagacggcgttcgccatcactatgccgttcatatttttgctgatatccaggcggtaatccgcgcggcaagaggcgcttccccagttcaccagcagcaggccctcttccggcaggccgctgaggaagacctggcctttatcgccgacgatactggccaggttcgcatcctgcccatcgacgcttgccgtcgcgccaaagggcacgggctcgccattgctgcgcgtcagcgttaacaacacgcgatagcccttatgcgtgtcatacgccgcgcgcaccaccgcattacgcgtcgggtagacggtctggttgttgagcggaatatccacgttgtcagcaaacgtgctgctgtcgagcgagatatcgtagcgataatacggcgtgacgttggggatcaccgtataaccccggaagtcggtggcgacgccggtctggttttcaaccgaaacgccgctggcgccgggcgctttaattaaaatcgccgcgccggtaatcggctggctcagggtaataccgttttcgtgcgccagaatgccgccgctgatgccgtagctgacttgttggctatctggcgactgattgtaaccggcgttgaggttggcataagtgcctttatagctggcgtttaccccgccggaatcaccgtcttgtgtgctgtggctttgctgtaacgaccagttcaggtttctgtcacgcagcgcggtgccgctaagggtggtgctgttcaccgtggcatcgtgcttacgcgtgttcagcatatagctggcgtatagcctggaatcgaacaccgtaaacggaacgtgcagcgacagcgtgaacagccgatcgttctggttataacgatcgtcgtcgttgtcatcatcgtcattgtccgaacggtactggtaggtgtttttgttatagctgtagctcagcgtatagctcaccggaccccagctattgttgtagctggcgctcagggattccatctgctgcgcgctgtgccagtaatcttctttgacccaacttagcgttaaggaaccgagcgtattgctaatttgctggttgaccgaagcttcgaaacgattatggcgcttgccgtagttatcataaaaatcgtcgtccgggttgatcacctcgctcagcgaattgtagttttcgctggcgtaacgatagccggccagcgaaaacgtggtgcccgtactgacgacgcccttgctgtagcggacgtgccaggattgcccgatttctttgcggccatcgtcaaatttggcgtgcgaccagatgccgtccagggaaatggcccccagcatctgcatattttgcccgacgccgaaggcgacggactggtatttatcgccggcaatctggctgccgccgtacagggtgatgccccacggcaggccgtacagcagggtcgcctggccgaagtcgtccagcgcgtggttgttataatcgcgatatttacccacggtcacgctgtattttgcccgtccggtgcgctgcagaatcggcagcgaagagtagggcacgataaaatgctgttcgctgccgtcggcttcttttaccgtcacgtcatagtcgccgttgctgccggtgggaaacatatcgttgatttcaaattcgcccggcgaaacggcggtctgataggcgatatagccgttttgccgcacgataacctgcgcgtttgagcgggcgatgccgcgaatcgtcggggcgtaaccacgctggctgttgggctgcatttgatcgtcagaggtgagctggaggccgcgaaaaggtacgctgtcgaacacgtcggatggcgtattgctgtctccggcggtgaactggcttttcagcgcgataatgtcgcgctgtaaatagttataaacgctgttccagctaccgttctcgccgttatttgaactccagttactgtagttgcgaaaacgccacggcccgaggttaaaacccggctggagagcgagatacttcgattccgcatcgtcggaatcctcactggaaccgtactctttatagccgctgaagctgtagttcagcatcagcgcggtaatcccctcctgccacttttccggcggtacgtagccgcgtgcgttgttggcgatgtagagttgcgggatgcttactgataatgcctgttgctgaaaatcaaaccgctggctggcgccggggataacgctgagatcgacgcagcctttttcactctccagcgttggaaaaaggtcggttttgacgccgttatcttttagttcctggagccgtaaacagccctgtaatgcctgttgaccgtcactgagcgtcgcgagttgaaaatcaacgtttcgtgcgccgatttctgttttattgatattgatagtgacgtaataggtgccaggcagctggcttttgtcgttatcaaatgtcgacagatcgacgcttgtgcgattcgcctgcccatggttttcaataaatgccggattgaaatagtcgcgcgcccatgcaacgtgtgtgaacgtgctgcccagcgcgatacacacagcgcagcgcgataaataaaatacccggtgttgccttttgcgcatcggcactctcatccctgtcactcttctcaaggcgtttgtttatgttcggggccagtaccgccaaaatcgttgatgatagaccagacaatcgggccgctggcggcggcaggcagcgtgtactgcgcgttgccgaaaggcgccacatagcgcggggctttcactttttgactgccaacggaaagggtggcgaagttcatataatagggcgtggggttcttcacggtgagcgtgcgaccctgacgcgaccacgttaaccgatcggcaacctcttctggtttttgggttaacgcttttggccggtaaatcagcttaaattccgctttaacggccagcatgagtgtgttgtgtttattgtccggattgctgctgggaatcgatttaatatccagccagtacagcgactcgcgatcttccggcaaattgccgccggtacggataattcgtagtacgttcttttgcccgccattaaggcgaaaaagcggcggggtgaccataaacggcgcatcaccgctcgccccggtttcactgatcgattgcgcccaggactgaattaaatagggaacgttgtcgctattgcttatcgatatggacgcatctttggcatcgccgtgaaaaataacccgcgttgtgccgatgtttatccctgcggcatgcgccagcgaaccgcacaacaggcaacaaagcaaccctgctttagccaatgaattcattgatgacctcaataaacaaaggggccagccgacgctggccaccaggatcagttatattgcagatagaatgttgcggttgcatcgaccgttcccgacttaacgggaaccgcggtggcgatatagcgggcggtgaaaggcattgagagttccgtcaccccctctgctgtagggaggttgactggggcagaccatgcctgaagatcgttaaaggtcataggggtgctagttttatcaagaatttgcacgccaatattctcagcatcatcctcatttttcaggatggtcgcatcggttccgtcgagtgtgccttcaaagcgcgcctgtacactgctgtagacgtttgcgtcgcagttttcgagttcgatggtgaagtctgtatcccctgccgtctgccctgcggcagtgaaaagagaggcaaattcttcctgtaatgtcacctctactgaatccgtttttaccgtacaggcgttttgcttaatgaggccggtgatatgtacggtgccgtctttggcggtgtctgccagcgcggcgggggagagggtgatggcggccagtgccacagtgagtgtttttaaggagagtttcattatctttgatcctttaagatattataaatattgacatagtaacaatatctatagtgtggaaagttattgttctttttattcccgaatgagtaaatataatgtccgatgatttttacggcgcgaagaaaaattcagaatacataaatatgaaatatttataatatatatttaatcaattattttggtgagtgtttgtttaattgaatcgccgtgattaccctttaatgggccagattctatgaaggctgctaacaattttaaaaataatgcaaatttttttgaataaaaaatgatcgtggtcatagtgtgttgtcggccaaaaaaacatgctgacatcatgcaggattggagctcaatggaggagaagttatgctgggatgggtcatttcctgtcatgacgatcgggcgcaggaaatgctcgaaggtcttgaaaagaagtatgggccgttggcgcagtgtcgggcggtcaatttctggcgtgggttaagcgtaaatatgctcagccgcatgatgtgtgacgccctccatgccaccgactccggtgaaggcgtgatatttttaaccgacatttccggcgcggcgccttatcgtgtagcgtcgctgatgagccataaacattctcaatgtgaagttatttccggtgtcagctattcattgatggaggaaatgattacctggcgagagtcaatgagcagttcagcatttcgcgaccagattgtcgcgcttggcgcgccggatgtcaccagtctctggcatcagcagcagaaaaatccgccttttgtattgctgcatgattcgtatgagttttgatcaataccattgacgacgcttttgctacaatgacggcgttttttcgcctcggttatgatatatggttatgcgcgttgttcttatcttgctgttctttttcgccggtaatgtgttggctgccttgcccgctcgttatatgcaaacgacgaaagatgccgccatctggtcgcagattggcgacaaaatggtgaccgtagggaatatccgcgccggacaaattctttccgtaacgcctgttgcggctgattattatgcctttaaattcggcttcggtgtgggctttatcgataaaggccatctggaatccgtgcagggaaaacaaaaagtggaagatggcctgggcgatcttaacaagccgctcagcaatcagaatctggtgacctggaaggacacgccggtgtataacgcgccggacatcagtagcgccccgtttggcgtattggtggataatttgcgttaccccattattagcaagctgaaaggccggctacatcaaacctggtatcagatccgtattggcgacaggctggcttatgtcaacgccatggatgcgcaggaagacaacggcattccgattttgacctatcatcacattttacgtgatgaagagaatacccgttttcgccatacctccaccacgacttcggttcgggcattcagcaaccaaatgacctggcttcgcgatcgcggctatgccacgttgacgatgtaccaactggaggattacatctataaccgcgctaatttcccggcgcgcgcggtggctatcacctttgatgatggccttaaatcggtgagtcgctatgcgtatccggtattaaagcagtacgatatgaaagcgacggcatttattatctcatcgcgtattaagcgccatccgcaaaaatggaatcccaggtcgctgcaatttatgagcgtgtccgaattgcgcaagataagcgatgtttttgattttcagtcgcatacccattttttacaccgggtagacgggcatcgccgcccgattttatatagccgcagctaccataatattctgtttgattttgaacgctcgcggcgggcgctcgcacagtttactccgcacgtattttatctttcttatccctttggcggttataacgcgaccgcgatcaaagcagcaaaagacgccggtttccatctggcggtaaccacggtgagagggaaggtgaagccgggagataatccgatgctgctcaaaaggctgtatattctgcgcacggattcgctggaaaccatgtcgcggctgatcagcaaccagccgcagggataaggactatcaggcaacctgtaccggaatagctttcgcggtgcgcttcatttcgttgtcgccttcaaaataggccactttcggacgccatgtacgcgcttcttcatcagacatggtgacgaagctggcgataatcacaatgtcgccaacttcagcgcagtgcgccgccgcaccgttcaccgagatgattctggagccgcgttcagccgcaatcgcataggttgagaaacgtttcccattggtcacgttccagatatcaatcgcttcgttttccagaataccggaggcatcaaggaaatcctggtcaatggcacaggaaccttcgtagtgcaggtccgcctgcgtgacttttacgcggtggagcttgccttgcagcatggtgcgaatcataacttctttaccctgtcgtttaccttggctaagcaggcgcttgtggcctgctttggaaattctcaggcagtattgcccgatttttaacccctgtctactgggctaatgtaacgctttgattatcgatcagacgcgcctgacccagccaggcggcagccagaatcactgcgcgtttgctggtttccgtcagctccagcagcgtgtcggcatcacggatttgaatgtcgtcggcacggaagcctttttcattcagttcctgttcggcaatggcaataatctcttgcagctcacgattacccgcaatcagtttttcagcgatgctattcatcacgttgtatagacccggcgcaattttgcgctgctctgcggtcagataagcgttacgtgagctgagcgccagaccgtctttagcgcgaataatcggcacgccgacgatctcaatgtcataactcatatccgccaccattttgcggatcagcgccagttgctggaaatccttctcgccaaagcaggcgatatccggctggatcaggttgaacagcttgctgacgatagtcgagacgccgcggaaatgacctggacggctggcgccttccagcatggtagagaggccgggaacatcaacgtacgtctggccttccagcccatgcgggtagatttcctcaacggctggcgcaaagacataatcgactttgcgtttgttcagcttttcacaatcttcctgcagcgtgcgcggataacgcaccagatcgtccggccgatcaaactgcatcggattgacgaaaatgctgacgatcaccacatcagcccgggcttttgcctcatcgaccagcttcatatggccgtcgtgcaggttgcccatggtgggaaccagtgcgacgcgtttaccttcctgacgcagacgacgaatatgctggcgcagcagcggcagggtttcaatgattagcacaacaaaactccttgagttgcttgatgatcctgcccgatggcgctgcgcttatcaggcctacatccgttgaggatctgtaggccggataagacgcgtcgcgtcgccatccggcacggtcagaaaaattagtgaaagctgtgttcttcgcccggataaacgccggactccacttcagccatatactgctgtacggcggcgcgcatgtcgcccgcttcggcgaggaaatttttcgcgaattttggaatatgaccgccggtgatgccaaacgcatcgtgcatcaccaggatctgaccgtcggtgacgttgcccgcgccgatgccgatcaccggaatcgacagcgcttccgtgacgcgcttcgccagctcaaccggcacgcactccagcaccagcagttgagcgccagcggcttctaaagccagcgcgtcatccagcagcacttgtcctgcatctccacggccctgaattttatagccgccgaagatattcaccgactggggcgttaaccccagatgaccacaaaccggcacggcgcgttcggtgagcattttcaccgtatcaaccagccaggcgccgccttcaattttgaccatattggcccccgcacgcatcacgatagccgcgttttcacatgcctgttccggggtggcgtaagccataaacggcaggtcggagagcaatagacagttgggcgcgccgcggcgtaccgcgcgggtgtggtaggcgatatcttccacggtgacaggcagggtggagtcgtgcccctgaattgtcatgcccagagagtcgccaaccagcatcacattgataccttcgtcggcaaataacttagcgaagctgtagtcgtaggcggtaattgtcgcgaagcgttttttctcttgcttgcatttctgcagcagtgaaatggtggtgggtttcataacgtttcctgatggtaaaagttatatttcccggcattctaacagtcatattcaggggggcaattgatttaagcaatcgtttggcgctaaagcagtaaacgctaaaggggaggcgatgttttaccagtgggcgggttttgcagcaccaagatgggtgagatgctgatgcaggctgataccatccggaaagatcagatcaggagcgatttcgaataacggccacagcataaaaccgcggtttttcatgtcgtagtgcggcacggtcagacggtcggtgttaatgacttcatcgccaaacagcataatgtcgagatccagcgtgcgcggcccccagcgttcggctttgcgcacccggccctgttgcagctcaatgcgctgggtatggttaagcaattcttcgggggcgagagcggtatccagcgccaccgcagcgttcaggtaatcgggctgatcctgtgggccaagcggcggcgtgcggtaaaacgaagaaaccgcgacgatacggctatcgggaatgtcggcgatagccttcagggcggcattgacctgctccagcggagaggccagattactgccaagcgcgatatacgcgatcgtcatacggtgccctcgcggcgcggcgcgcgtttgcgcggacgtgaacgacggcggcgtggagcaggatcgtcgtccagctcgttgagcatccctttttgttccggcggcgcggaagcctgaaactcggcccaccactgcgccagacgttgcagttcagtattattttccacctgagcgcgcagctccagtaaatcaaacgcggcgcggaatttgggatgttccatcagtttccaggcgcgtttgccctgacgtcgcgacatgcgtaactgaagctgccaaatatcacgggtaagcgtggtaaggcgtttcgggatcgccagtgaacggcaggcctcatccagcacatcattcatggccagcgcgaaagcgtcgtaataggccagaccgctctcctgagcgattttttgcgccatctccagcagcggataccagaacatggcggcaaacaaaaatgccggattaacgcgcatctcgttacggatgcggttatccgtattcttcaacacctgcgcaatgatgcgttccattgcgctgtcgccgttttcggtgaaataacgcgtaatggtaggaaacaacggctggaagaggtggtattcccgcagttgttgataggtttcgtaaccgttccccgcctgcaacagcttcagcgactcttcgaacaggcgcgcgggaggaatgtcgtttagcaaggttgccagacgcgggattggctcagccgtttcagggctgatatgcatattgagcttcgcagcgaaacgcacggcgcgcagcattcgaaccggatcttcgcggtagcgcgtttccggattgccgatcaggcgaatcacgccttcttgcagatcctgcatcccgccgacgtaatcgcgcacggtaaaatccgccacgctgtagtaaaggctgttgatggtgaaatcgcggcgctgggcatcttcttcgatagagccgaagatgttgtcgcgcagcagcataccgttttgcccacgctgggaggtcgtacggtcgctttcactgccttcatgatgaccacgaaacgttgccacttcgataatttccgggccaaacatcacgtgagccaggcggaaacgacgtcccaccagacggcaattgcggaataatttccgtacctgatccggtgttgcgttggtagtcacgtcgaaatccttcggctttttgccgagcaggagatcgcggacgccgccgccgaccaggtaggcttcatagcccgctttgttcagcctgtacagtaccttgagggcattttcactgatatctttgcgggagatagcgtgctgttcacgcgggataatcgtcatatgtggacgggcgacggcttgttctgcctcgctctcctcgcggcttaacaccttacggcaaaaattagcgactcgggtaaaaatagcgcacctcggtagtgtcatacattaataagatcaacttactctatgtctttcgcattacggcagacgggcgtaagagagcaacgcgacctgggctgtaagcatcattaacgccgcagcaatgcgaaagacgatgagcaaaaatagcggctaatcatagctcagcgagacgcatttgagaatgccggatttacattagccgatgtgggtacggctgtaagcctccagtgcgccactgcaaagcgcagcaactcctcaacagacatctcctgccacgctacgacgtcgcgttggcctaaaaagcgcaatgcctggaccagtaccgggcgcggatcgcctgtcgcaagcgcaggggcatgattttgcttggaaagtttagcgccttgttcgttgagcgccagcggaaggtgcacgtagcctggcgcacgccagccaaactgtttatacagcgaaagttgtcggacagtgggttcgattaaatctgcgccgcggacgatctccgtcaccccctgaaaatgatcgtcgaccaccacggccagattataagcaaacagtccgtcgcggcggtggataataaaatcttcgctcgccagctgtgggtcagcctggatgtcgccgcgcaaggcatcatggaaatgcatcaccggatgctgctgtttaattctgacggcggcattctccggcccgtggcataacgtccgacaatggccgtcgtaaataccgcccagacgttgaatgcgcgagcgggggcaagtgcagtagtagctcagtccctgctcgtgaagccaggccagcgcctcgcgataagcctcatgacgctgtgattgccataagacctcgccatcccagtgcaggccgtaatgttccagctggcgcagaatggtcgctgcggcaccgggaacttcacgtggggggtcgatatcctcgatgcgaacgcgccaaattccgcgttgcgcacgggcttgtagatagctgccgagggcggcgattaacgagccgaaatgcagttcgccggatggcgacggcgcgaaacggccaatatagtgtgagtcagtcatgctgcgggcaataaagaataaggcgggaaaactcccgcctgtcataaatagggtagaaacgaacgggattaacccgccatctgtttttcgcgaatttcagccagcgttttgcagtcgatgcacagatcggctgttggacgcgcttccaggcggcggataccaatctccaccccgcaggactcgcaataaccgaagtcttcatcttccactttcttcagcgtcttctcgatctttttgatcagtttgcgctcacggtcacgattacgtaactccaggctaaactcctcttcctgcgcggcgcgatcgaccggatcggggaagttggcggcttcgtcctgcatgtgcgtcacagtgcgatcgacttcatcccggagttgattacgccatgcttcaagaatacgcttgaagtgcgatagctgggcttcgttcatatactcttcgcccggtttctcctggtacggctccaccccagcgatggcgagaatactcagggacgatgttttacggttttgcccttcttgcatgttgcttctccttaacacgcactatcgatccccatgttcgggggaaaatcaggtcgctataaatagcagatgcttttccggatagcaattatctaaacgtaacacttgacaaccctgtgaggaaaagcgtatttacgcacgcggccagaatacttaataatcaggctgttattccactacaacgttatgggtactggttcgttcagttccattttttgggctgaaagttctgctttataagctaaaacttccacgcctttattctgagcctcgctcaatagctgcgcgtattttatatcgatatgacgtgcgggggaaaaacgtgtaatggcggagtgcagcaccgcgaacaccaccactgcgcgatgacctgccgccgcaacgcccatcaattcccgaagatgtttttgccctcgttcggtgatggcgtcgggaaaataaccgttttctttttccgctaacgtgaccgatttcacttcaatatagcagtccgggcggaaatctgcctgtaacataaaatctatacggctgcgctcggcgccatatttgacttcacttttcagaatattgtaccccgccagcgccggcaggcgattctcctgaatcgcttctttcgttagctggttcgcccgcagcgtattcacgcaaatgaatgcgccggattgcgtttcagtcaattcccaggtatgcggatatttgcgtttagtattttctgatgtcgaataccagacggtatcgccaggcgtggcgcagccggtcatcgcgccggtattaggacagtgcagcgtaagcgtcgtaccgtcaggggtgatcacatcggctaaaaaacgtttatagcgctgaatcagcgtagcgcgttgtaaagggggtgaaaatagcatcgacattccttcattattattcgcccagcgtccagcgctgcagctcggcatagcgggtacggccttgcccatacgaagaggcgtaaagcgcaaacgacgtgaccggaaatgaccagcaaaagcccggcggcgggatagccaccgtatggctggcgtcgcgcagcagcgtaatatgcgggtgaaaaggctgcgggctttggtaacaaccgctgcgggcggcctgcgcgcgcagcatattagccaactgcaacaacccgcgcggcggctggcgcatccccagccacaccacgcgcgaacgcagccactgaccggcgtcatccagatgtagcgtaaagcccggctgtcgaattcgtccggccagttgcgcaagcgcgcgctgcttatcgctactgacgtcgcctaaaaaggccagcgtcaggtgcaggttcgccgctgccacggggcgtccgtcttcagacgcaaaatgggcggcgcgccaggcgataatttgcgcgcgcgcgtcgtcgggtaagtcaatcgcaaaaaacagccgttttggctcagacatagggatactcggttatggattaacacgatgctacaatgcggcgcaaagaaagttaaccccgtggagccgtttgtgacgtcattgcccgttgccgccgtattgcctgaattgttgacagccctaaaaatcgcgccgcaggttttgttgtccgcgcctaccggggcggggaaatccacctggctgccgttgcaactcctgcaacaggggccggttgctggaaaaatcctcctgcttgaaccgcgtcgtctggcggcgcgtaatgtcgcacagcgtctggcggaagcgttgaatgaaaagcctggcgaaacggtaggttaccggatgcgcgcgcaaagctgcgtggggccgcgtacccggctggaagtggtgaccgaaggcgtattgaccagaatgattcagcgcgatcccgaattacgcggcgtggggctggtgatactggatgaatttcatgagcgcagtttacaggcggatttagcgttggcgctgttgctggatatccagcaagggctccgtgacgatctcaggctgttaatcatgtctgcgacgctggataacgacaggctttgtcagcgactgcctgatgcgccgacgatcgtctcggaggggcgcgcgttcccggtggagcgacgttatcagccgcttgcggcgcatttgcgttttgatgaagccgtcgcgatggcgacagcggaactgctgcgcaatgaaaacggttcgctgctgctatttttacccggcgtaggcgaaatacagcgcgttcatgaacatctggcgtcgcgggtagggagcgatgtcctgctttgtccgctgtatggcgcattgtctctggaagcgcaacgcaaagcgattgttccggcacccgccgggatgcgtaaagtggtgttggcgactaacattgccgaaaccagtttgacgattgaagggattcgtctggtcgtcgatagcgctcaggagcgcgtggcgcgatttgacgcgcgaacgggactgacgcggctggttacgcagcgtatcagtcaggcatcaatgacgcagcgcgcggggcgcgccggacgactggcgccgggtatctgtttacatctgctggccaaagaacaggcggagcgggcggcggcgcaaagcgatccggaaatcttacacagcgacctttccggtttattgatggaggtgttgcagtggggatgtcacgatccggcatcgcttttctggctggacaggccgccggaggtgaatcttcaggccgcccgccgtttattattgatgttaggcgcgctggagggcgagcggttaagcgcgcggggccggaaaatggcggcaatgggtaacgatccgcgcctggcggcgatgttagtcaacgccggcgagggcgatagcgccgccactgccgccatgctcgcggccatccttgaggacccgccgcgcggcggcggtacggatttaagcgtagtattttcgcggcgacagccgggctggcagcagcgtagccagcagcttttaaaacggctgcaggtgcgtaatggcgagccggatagcgcgcttattatgccgctgttggccagagcgtttagcgaccgcatcgcgcggcgtcgtggtcaggaagggcgctatcagttagccaatggtatgggcgcgatgttagatgcggatgacgcgttgggacgtcatgaatggctgatcgcgccgctgttactgcaaggtagcgcctcgccggacgcccgaatattgttggcgcagccgctggatattgcctcgctgattcaggcgtgtcctgatttactgcgccagtccgacacggttgaatgggacgaggcgcagggaacgttgaaagcatggcgcagaatgcgtattggacagttgacggttagcgttcagccactggcgaagccgtctgaagaggagcttcatcaggcgatgctgaacggcatccgcgataaaggtctgtccgtccttaactggacgccggaagcggagcagttccgtctgcgtctgcactgtgcggcgaaatggctgccggaatatgactggcctgccgtggatgaggcgtcgctgctggcgactctggaaaattggttgctgccgcacatgacaggcgtacagtcgttacgagggctaaaatccctgaacgttaatcaggcgttacggggactgcttgactatgccatgctgcaacgtctggatagtgaactgcctgggcattacactgtgccgacgggaagccgaataacgattcgttatcatgaagataacccgcccgcgctggcggtcagaatgcaggaaatgtttggcgaagcgaagaccccaaccatcgctcagggccgcgtgccgctggtgctggaactgctttcgccagcgcagcgaccgctacagattacgcgcgatttaagcgctttctggcagggggcgtatcgcgaagtgcaaaaagagatgaagggccgttaccccaaacatgtctggccggacgatccggcgaatacggccccaacgcggcgcacgaagaagtattcgtgacgtgttatacgttgcctccaggccagataaggcgttaatcgccatccggcaaaagagtaaattgagagatttcttcttctgtcgtctggcggaagaatagagaatcgggcctttgcgcctgtatgttgcggagaaaaagcatggcggggaatgaccgcgagccgattggacgtaaggggaaaccgtcacgtcctgtgaaacaaaaggtgagccgtcgtcggcagcatgacgacgattatgatgatgactatgaggatgaagaaccgatgccgcgtaaaggtaagggcaaagggcgtaagcctcgtggcaagcgcggctggctgtggctattgctaaaactgtttatcgtttttgtggtgctgttcgccatttacggcgtctatctggatcaaaaaatccgcagccgtatcgatggcaaggtctggcagcttccggcggcggtatatggccggatggtgaaccttgagccagacatgcctgtcagcaaaaacgagatggtgaaattgctggaagcgacgcagtatcgtctggtgacgaagatgacccgtcccggcgaatttaccgtgcaggccaatagcattgagatgatccgtcgtccgtttgacttcccggacagcaaagaagggcaggtgcgcgcgcggctgacgttcagtgacgggcgtctggaaaccatcgtcaatctggataacaaccgccagtttggcttcttccgtctcgatccgcggcttatcaccatgctttcttcgccaaatggcgagcagcgtttattcgtcccgcgcagcggtttcccggatctgctggtcgatacgctgttggcgacggaagaccgtcatttctatgagcatgatggcattagtctttactctatcgggcgtgcggtgctggccaacctgacggcgggacgcacggtgcagggggccagtacgctgacccagcagctggtgaagaacctgttcctctccagcgaaagatcatactggcgtaaagcgaatgaagcctacatggcgctgatcatggatgcccgttacagtaaagatcgtattcttgagctgtacatgaacgaggtctacctcggtcaaagcggggacaatgaaattcgcggttttccgctggcgagcctgtattactttggtcgtccggtagaggaactgagcctcgatcagcaggcgttactggtggggatggtaaaaggggcgtcgatttataacccgtggcgtaacccgaaactggcgttggagcgtcgtaacctggtgttacgcctgttacagcagcagaaaatcatcgatcaggaactctatgacatgctgagcgcgcgtccgcttggcgtacagccgcgcggcggcgttatttcaccgcagccagcgtttatgcagatggttcgtcaggaactgcaggcgaagctgggggataaaattaaagatctctccggcgtgaagatcttcaccacctttgactccgtggcgcaggatgccgcagaaaaagccgttgtcgaaggtattccggcgttgaagaagcagcgtaaattgagcgatctggaaaccgcgatggtggtggtggatcgctttagcggcgaggtgcgcgcgatggttggcggggcggagccgcagtatgccggctataaccgtgccatgcaggcgcgccgttccatcgggtcgctggcgaaaccggcgacctatctgaccgcgttaagtcagccgaacttataccgtctgaacacctggattgccgatgcgccgatttctctgcgccagccgaatggtcaggtctggtcgccgcagaacgacgatcgtcgctacagcgaaagcgggaaagtgatgctggtggatgcgttaactcgctcaatgaacgtaccgacggtcaatctggggatggcgttaggtttaccggcggtaaccgatacctggacgaagctcggcgtgccgaaagatcagctcaatccggttccggctatgctgttaggagcgctgaacctgacgccgatcgaagtggcgcaggcgttccagactatcgccagcggcggaaatcgcgcgccgttatcagcgctgcgttcagttattgcggaagatggtaaagtgctgtaccaaagttatccgcaagctgaacgcgccgtaccggcacaggcggcttacctgacgctctggacaatgcagcaggtcgtccagcgtggtacggggcgtcagcttggcgcgaaatatccgggtctgcatctggccggtaaaaccgggacgacaaacaacaatgtcgatacctggtttgccggtatcgacggcagccaggtgactatcacctgggtaggccgtgataacaaccagccgacgaaattgtacggcgccagcggcgcgatggcgatttaccagcgctatctggcgaaccagacgccgacgcctttagttctgacgccgccggaagatgtggtggatatgggcgttgattacgacggtaattttgtctgtagcggcggtatgcgcactctgccggtctggacggacgatccaaatacgctgtgccagcagggcgagatgatgcagcaacagcagcagccgtcaggcaatccgttcgatcagtcgtctcagccgcagcagcctgcgcagcaacagccgccgaaagaagagaagagcgacggcgttgccggctggattaaggagatgttcggcggcaattaatcacggtaatagtgccgggtggcgctgtgcttacccggtctacaccgttacgaccccattatgtgcgacgtaggccgaataagacgcttacgtcgccatccggcaaatcctccataaataacatttcagtctaatttattaacccttccttttcatctggttatttcttaaccccttagttttcgtagggccgcgtatcgcttgccattgcgacgatatttcgcctatcatgctgcggttataataataattatcgtttacgttatcattcactttcatcagagatataccaatggcgcgtcttaaaactgctcagccaaactcctcactgcgtaaaatcgcagttgtagtagccacagcggttagcggcatgtctgtctatgcacaggcggcggttcaaccgaaagaagaaaccattaccgtaaccgcagcgcctgccgcgcaggaaagtgcctggggaccggctccgaccatcgccgcgaagcgttccgccaccaccaccaaaactgatacacctatcgaaaaaacgccacagtcggtttcggtggtcactaacgaagagatgcagatgcatcaattccagtcagtaaaagaagcgttgggttacacgccgggtgtaacggtaagcagccgcggcgcttccaatacctatgacttcgtgattatccgtggcttctcttccgtcggcctgagccagaacaactatctggatggcctgaaattgcaggggaacttctacaacgatgcggttattgatccctacatgcttgagcgtgttgagttgatgcgtggcccaacgtccgtcctctacggtaagagcaacccgggcggtatcatttcgatggttagcaagcggccgactactgagccgctgaaagaaattcaattcaaaatggggacggacaatttgttccagaccggttttgattttagtgattccctggatgacaacggtgagttctcatatcgtctgacggggctggcgcgttcgacaaatgagcagcaaaagagttctgagtcgcagcgctatgcgattgcgccctcttttacctggcgtcctgatgagaaaacgaattttacgttcctttcttatttccagaacgaaccagagaccggctactacggctggctgccgaaagagggaacggttgaaccgttaccgaatggtaaacgcttgccgacagatttcaatgaaggggcgtcaaacaacacctattctcgtaacgagaaaatggtgggatacagtttcgagcatggcttcaacgacacttttaccgtgcgccagaatttacgttttgtcgaaatgaaaaccgcgcaaaaaagcgtctatggcacggggattgcggcggacggccatacgcttaaccgcggtactatcgttgacaacgagcgtttacagaatttcagcgtagatacacaactggaaagtaaattcgcgaccggcgatattgatcatacgttgctgacgggtgtcgatttcatgcgtatgcgtaatgatattaacgcgacgtttggtagcgcgccgtcaatcgatctctataacaattaccatcctgaatactttgctttcggcggcgctgagccgtaccagatgaacgaaagtaaacaaacaggcctctatgttcaggatcaggcggaatggaataagtgggtatttactctcggcggccgctatgactggtctaaacaagcgacaacggtgcgtcagaattccactacgccgacagaaggatatattgaacgtaatgaccaccagttcacctggcgcggtggcgtaaactacgtattcgataatggaatttcaccttacttcagctatagccaatctttcgagccaagcgccttcgatttgtggagcaccccacgcgtttcttacaagccgtcaaaaggcgagcaatatgaagcaggggtgaaatatgtaccgaaagacatgccggttgttgttacgggtgccgtttatcagctgaccaaaaccaataacctgaccgccgatccaaccaacccattagcgcaggtgccggcaggcgaaattcgtgcgcgaggtgtagagctggaagccaaagcagcattgacggctaacatcaatatgacggcgtcttacacttatactgatgctgaatacacgaaagacactaatctgaaagggaatacgccagagcaggtgcctgaacacatggcgtcgttgtggggcgattacaccttcaacgaaggtccgttgtcaggtttaacgctgggaacaggcggtcgttttattggttccagttacggcgatccggctaatagcttcaaggtaggcagcgcagcggtgatggatgcggtcgtcaagtacgatctggcgcgttttggtatggcgggctccagcattgcggttaacgttaataatctgctcgaccgcgaatacgtcgccagctgcttccagacctacggctgtttctggggcgcagaacgtcaggtcgttgcaacggcaaccttccgtttctaatttctttttgggcacggcttgccgtgcccgttttacaagttggctgcgatgcaggaaaaccacattcattccgataccacctttgcgctgcgaagcgtcgcctttcgtgtgccgggccgcacgcttttacaccccctctcgttaacgtttcccgcaggtcgcgtcaccggacttattggtcataatggttccggtaaatccacgctgttaaaaatgctgggccgccatcagccgccttccgaaggggatattctgctcgacaatcagccgctggcgagctggagcagcaaggcgtttgcccgcaaagttgcctatctgcctcaacaattgccacaggcggaaggaatgacggtgcgcgaactggtggcgattggccgctatccgtggcacggcgcgctgggacgctttggcgtcgcggaccgggaaaaagtagacgaggcgattacgctggtcggcttaaaaccgctggcgcatcgtctggtagacagtctttccggcggtgaacgccagcgcgcgtggattgccatgctggtcgcgcaggacagccgttgtctgctgctggatgagccgacgtcagcgctggatatcgcccatcaggttgacgtgctggcgctggtgcatcgtttaagccaacagcgcgggctgacggtggtagcggtgctgcacgatatcaacatggcggcccgctactgtgattatttagtcgcgctacgcggcggtgaaatgattgcgcaaggaacgcctgcggaactgatgcgcagtgacacgctggaacagatttacggtatcccgatgggtatccttccgcatccggcgggcgcggcacctgtgagttttgtgtattaatgcgtgatttatatcctcttactcgccgccgtttattaacggcgatggcgctctcgccgctgctgtggcaaatgaatacggcgcaggctgccgctatcgatccccgccggattgtggcgctggagtggctgccggttgagctgctgctggcgctcggtattacgccgtatggcgtggcggacgtgccaaattataagctgtgggttagcgaaccgccgttgccggattcggtgattgatgtgggtcttcgcactgaacccaatctcgaactgctgacggagatgaagccgtcgtttatggtctggtcggcaggctacggaccctcgccggagaaactggcgcggatcgcgccggggcgcgggttcgattttagcgacggcaaaaagccgctggcggtggcccgacgctcgctggttgaactggcgcagacgctgaatctggaagctgcggcagaaaaacatctggcgcaatacgatcgcttcatcgccagccagaagccgcattttatccgccgcggggggcgtccgttactgatgacgacgcttatcgatccgcggcatatgctggtgctcggcccgaattgcctgttccaggaggtgctggacgagtatggcatcgtcaatgcctggcagggtgaaaccaacttttggggcagtacggcggttagcatcgatcggctggcgatgtataaagaagcggatgtgatctgcttcgatcacgggaataacaccgatatgaacgcgctgatggcaacgccgctgtggcaggccatgccgtttgtccgcgccgggcgctttcaccgggtgcccgccgtttggttctatggcgcgaccctctccacgatgcactttgtccgcatcctgaataacgtgttgggaggcaaagcgtgagcagaaaacgtgaaatgccggatggcggcgcgaaaagcgtcttatccgacctacggttcgggcgctttgtaggccggataaggcgaagccgccatccggcgttgctgttattggcgctgtttgttgccgcctgctggctgacatgggttaacttctccgttgcgctaccgcgcagccagtggcaacaggctatctggtcaccggatatcgacatcattgagcagatgatttttcattacagccagctgccaagactggcgatttcgctgctggtgggcgcggggcttgggctggtaggcgtcctgttccagcaagtattacgtaacccgctggcggaaccgaccacgctgggcgtggcgaccggcgcgcaattggggatcacggtgactatgctttgggcgattcccggcgcgctgaccacgcagtttgccgccctgacgggagcctgtatcgtcggcgcgctggtgttcggcgtggcgtggggcaaacgtctgtcgccagtgaccctgatcctcgccgggctggtggttagcctctattgtggcgcaatcaaccagttactggtgattttccaccacgatcagttgcaaagcatgtttttatggagcaccggaacgctaacgcaaaccgactggagcggcgtgcagcgtctgtggccgcagttgctgggcggtgtgatgctcacgttattgttgttacgcccgatgacgctgatggggctggatgacggcgttgcgcgtaatctgggtctggcgctgtcgttagcgcgtctggcggcgctgtcgctggcgattgtgttgagcgctctgctggtcaacgcggtgggcattatcggttttatcggcctgtttgcgccgctgctggcgaaaatgcttggcgcaagacgtctgctggcgcgcctgatgctggcgccgctcattggggcgcttattttgtggctatccgatcagattatcctttggctaacccgcgtatggatggaggtttccaccgggtcagtgacggcgttaatcggcgcgccgctgctcctgtggctgctgccgcggcttaaaagcatgagcgcgccggatatgaacgccagcgatcgtgtggcagcggaacgtcggcacgttcttgcttttgccgttgccggtggcgcgctcctgctgctggcaacatgggtcgccctctcttttggtcgcgacgcgcacggctggacgtgggcgagcggaacgctgcttgaagaactgatgccgtggcgctggccgcggatactggcggcgttaatggcgggcgtcatgctggcggtggcgggctgcattattcagcgtctgaccggtaatccaatggccagcccggaagtgctggggatcagttccggagccgcgtttggcgtggtgttgatgctgtttttggtgccggggaatgccttcggttggctactgcctgccggaagcctgggcgcggcggcgacactgctgattattatgatagccgccgggcgcggcggtttctcgccgcaacggatgttgctggcggggatggcgctcagcaccgcgtttaccatgctgctaatgatgctccaggcgagcggcgacccgcggatggcggaagtattgacctggctctcaggatctacctataacgccactggcgggcaggttacgcgaaccgcgatcgtgatggtgattttgctggccattgtgccgttgtgtcgccgctggttaacgattttgcccctgggcggcgatgccgcgcgtgcggtgggcatggcgcttacgccgtcgcgtatcgcgctgctggcgctggcggcttgtttgacggcaaccgcgacgatgaccattgggccgctgagtttcgttggactgatggcgccgcatattgcgcggatgctcggttttcgccggacgatgccgcatatggtcatctcggcgctggcagggggcgttttactggtctttgccgactggtgcggcaggatggcgctatttccgtatcagatcccggcgggactgctttcaagctttattggcgcgccgtactttatctatttgctacgtaaacagagtcggtaaaaaaaagctgtgccacatttatgtcgggtggcagccatgctcaacccgacctacaaattacacaatatcaatatgttgtggcaatattttgtaggcctaaaaatagctgaacgctatcaggtgcgagagctgtcctgtcacgttttatcgagggaactctgcttttattttcagcaagaagcaggtgttatttttgtatcgataagtcatgagctatttcagtggcgcgccgctgtctcgtgaacagggtgactaatttcaacatatccaggcccgaaacgttgatgataaattgcggcatgatctatccaataataagaattaccggtttcggtattaagcctttttaaatattaagatgcggatgccgcatctttaatgcatctcgtaaatcaattttaatttaataataaattttcattataaaacttcgataataaaatattattttttatcgaagtaataaaaaacaactctattaaaataaattaattgccacgagtaaacaaaaaaaatgtaatttagcattttttgttttttttaatgaaatttataccaaaaataaatgttacgcgtcattgctatatattcagtactgtaattctgatctttttttattcattttgacatgtttattgtttttttggctctcccgtcttgcttgctttgtttgttttttgaacggtaaaaatatttattatttaattctgataatcctttaaataaaaaacgcttgtctttgggtttttaatggaaaatacttcaccgcgcctaagggatgttatttattaacgtgttgtttgcttcttttgaatgttgcatcggcaatttcataactcgtcatataatatatatctactaatataaacatggggtattgagtataactctgtgtgaatagcgtaaaaatactcaccaacttttaataaggatgaaaaatgaatacagcagtaaaagctgcggttgctgccgcactggttatgggtgtttccagctttgccaatgctgcgggcagtaatactggtacggtgacttttaccggtactattgaagattcaccgtgttcaatcgtggttggcgacgaacaccagaccgttaacctgggccatatcggtaccggttctctgatgggcggtaaagaatcttcaaaagtcgatttccatatcggtctggaaaactgcgcattcaccactgagaaagaagcgtctaccgttttctctgccatcggtaacgaatccagcgctaatccgggcagcgttgcgctgatgcgtatcggcggcggcgaaatggcgggttccagcattgttatcggcaaccacctgggttccgcgatcaaattgggcgacgcttacagcgaaaacctgacgatgaacggcagcgttgcggcggcgaaacagactcttaacttcaaagcctgggtgaaaggcgattctgctgccaccactatcgataccggcgaattcagcagcaccgtaaacttcacgatcagctatctgtaagtgaaatatcatcctgcggcagtctgccgcaggatgatgctcaaagtaaaaaaatagattatatatttcagggatagattgtctgatggctcactataaaaaatttcgtctgagcacgcttgcggccgtggtgggtattgttctggctgtcggtccggaaaatagctacgcggaagcgcccattcaatttaatacccgatttcttgatgttaaagatgatgccagcctggatctctcccgtttttcccgtaaaggctacattatgccggggagctatcatctccaggtgctggtcaatcagagtcaaattgtccaggataatgttattacgtattccgttgataataacgatcctgataacacctatccctgtttatcgcctgaactggtctcgctgctggggttaaaacctgaaatagcagataaaatgatctggataaatgccggtcagtgtctgcaaccagatcaactggaagggatggaaacccaaacggatttaagccagtcaacgctgacggtgattattccgcaggcgtatctggaatacagcgatgaagagtgggatccaccttcccgctgggatgaagggattcccggcgtattatttgactacaacgttaacagccagtggcgacatgctgaacatgatgacggcgatgaatatgacatcagcggcaacggcacggtgggtgccaacctcggcgcgtggcgtttgcgcgcggactggcaggctaactatcgtcacgaaaatgacagcgaagataaagacaactttggctccagttccgaacagaactgggactggaaccgctattacgcctggcgggcgatcccgcagctccgggcgcagctaacgctgggcgaaggatcgctggaatccgatattttcgacggctttaactatgttggcggcagccttatcaccgacgatcagatgttaccgcctaatctgcgcggctacgccccggatatatcaggcgtggcgcgcaccaacgccaaagtcaccgtgacccagcgcgggcgggtgatttatgagtcgcaggtcccggctgggccgtttcgcattcaggatattaatgaaacggtatccggcgatctacacgtcaaaattgaagaacaaagcggtcaggtgcaggaatatgacgtcagcaccgcctccattccgtttctgacccgtcccggccaggtgcgctacaagttggcagccgggcgaccgcaggactgggatcacaatatggaaggcggctttttcacctcagccgaagcctcctgggggatcgctaacggctggtcgctgtacggcggtgccatcggtgagcaggattatcaggcgctggcgttaggactggggcgcgatctggcgctgctgggcgcgttttccgtcgatgtcacccattcccgtgcgacgctgccagagggtagcgcctacggcgacggcaccattcagggtaactcgttccgtgccagctacgctaaagattttgatgatatagacagccgtctgacgtttgctggttatcgcttttccgaagaaaactacatgacgatggacgagtttatcgatacgcataatgacgataacgatcgtcagcgcaccggccacgataaagagatgtataccctgacgtacagccagaacttttcggcaataaacgtcaacgcctatatcaactacacccatcgcacctactggaatcaacctaaccaggacagctataacctgacgctgtcgcactatttcgatgtcggtgaggtgcgcgggatcagtctgtcggtgaacggttttcgcaacgaatatgacaatgagcgtgatgacggcgtgtacgtctcgctcagtattccgtggggcaacaaccgcacgctgagctacaacggctcctttagcgatgacaacaacagcaatcaggtcggctattacgagcgcattgacgatcgcaataactaccagatcaacgctggtcgcgcggataacggtgcgactctcgacggctactaccgttatcaagcgagctatgccgacattgacgtcagtgcgaactatcaggaaggcgactatacctccggcggactgaacatccagggcggcgcgacgctgactgctaaaggcggggcgttgcaccgcaccagcgtcaacggcggctcgcggctgctggtggatgtcggcgatgaagcgaacgtacccatctccggctacagcacgccggtatataccaacgcgtttggtaaagccgtcattgtcgacgtcaacgactactaccgcaaccaggtgaaaatcgacattacccagttgccggaagacgcggaagcaatcctctccatcgctcaggcgaccctgacggaaggggcgatcggttatcgccgcatggaggtgctcagcggtaaaaaagccatggccagtatccgcctgcgcgatggcggcacgccgcccttcggcgcagaggtttacaacagtcgccagcaacagttagggatcgtaggtgaagacggcagcgtttatctgatcggcattaaccccggcgagcggttgcaggtgacatgggaaggtaaaacgcagtgtgaagcgacgttgcccgatccgctgccgggcgatctgtttagcggcctgttgctgccgtgcatcggcgacgcttcatcacctgaggcaacgcagcccgaagagaaaccattactccagcttcatacgcagcggcggacgtcttcgacgcaacccgaagcgctctcttctcgttatccaacacattgattcaggaaaccgcattcatgatgtcattaaaacgttataacctggccgctgttttgctgcttttgctgggcggctacggtagcgcccaggccgccatcgcgcccgatcgcacccgcctggtgtttcgcggcgaagataaatcgataagcgtcgatctgaaaaacgccaacagcaaactgccctatctggcgcagtcctgggtggaagatgagaagggcgtcaaaatcacctcgcctttaatcgtcgtcccaccggtccagcgcattgagccgtcggcaatcggacaggtcaaaattcaggggatgccggcgctggcgtcgctcccccaggatcgggaaacccttttttattacaacgtgcgcgaaattccgccgcaaagcgacaagcccaatacgctgcaaatcgccctgcaaacgcgcatcaaagttttttaccgcccgcaggcgctatcgaaaatcgatatgcagcatccctggcaatacaagatcacccttcagcgtcagggcaatggctatcaggtgagcaacacaaccggctactacgtggtgttaagcaacgccagcaaccgcatggacggcacaccagccagaggctttagccctttagtgattgcaccaaaaagcaacgtgacgctgggaggggacgccagtgaattaggtcactcgcctgtgctgacttacgtcaacgattatggcgcgcggttaccgctgatttttaactgtactgacaacagttgtgcggtagatgaagcaaaaagcagaaagtcgtaaccgacaaggagacgcaagatgaggcaatggcggttacggctgggcacggtaacgtgtgcggccatgctgagtgcggtcagtatgccgctggcagcgggaagtaagacggtcaacatgacgctgacgatagtcgttaatgccgcgccgccctgtactgtgaccggcggtgaggtggaatttggcaatgtgttgacgacgaaagtggatggggtgaattaccggcaggcggtgggctatcgcctgagctgtaacggcagagtgagcgattacctgaagttacagattcaggggaatgcggtgactatcaatggcgagtcggtattgcaaaccgatgtcgatggattgggtatccgtctgcaaaccgccacggatggcgcgctgatttcacccggcaatacgcaatggttgtcatttcaatacagcggcggcagcggtccggccattgaggcgattcccgtcaaaaataatggcgtaacgttaacaggtggcgcgtttaacgcaggcgccacgttggtggtggattaccaatgaaaaaaatagttttgacgatgttaatggggggcagccttgccgcacaggcagccgataatcttaagtttcacggcacattaatttcaccgccgaattgtacgattaacaatgatcagacgatcgacgttaagttcggtaacctgctgattaataaaatagatggtacgcgttatgcgcagaatgttccgtatgagatcacctgtgattcaacggtgcgcgatgagacgatggcgatgaccctgacgctaagcggttccgtgagtgattttaatccggcggcggtaaacaccagcgtggcggggctggggattgaactcaggcagaacgaccaaccctttacgttggggtccaccattacggtgaatgaacaatcgatacctgttctgaaagccataccggttaaaaagagcggtgcttcgctgaaagaaggcggcttcgatgcgacggcaacattacaggtggattatcagtaatggctaaaagacaggcgttattacacggcgcggcctgcatcctctgtggggcgctgatattgccggtctcagcggcagataacctgcatttttccggtagcctggtggccagtccttgcacgctcacgatgcaggggacggggattgccgaagtcgatttttcgtcgcttgacagttctgatttcactcccgacggccagtctgctcgtaagcctttggtgtttgaactcacggattgcgattcggcgctgagtaacggggtgcaggtgactttcactggaaccgaagcgaccggaatgcgcggtatcctggccatcgatagctattcaggcgcttccgggatcgggattggtattgaaacgctatccggcgttcccgtgggcatgaacgataaagagggtgcgatatttacgctggtgacggggaaaaatacgctaaacctgaatgcctgggtacaacgtcttcccggcgaggacctgattccgggaaggttctctgcaagtgcgctagccacatttgagtatttataatgaaaataatacggactttatttttgctgctgattgccgtttatggcagttcggtagtggccaaacccatgctgaaagcgacgttttcaagcaccacgatgtattatggtattggccctaatagcgacaaatctattgtggcggaggtgacgatagcgactccggagggagtgtactatggctcctggaacctttcgggacatcgtaaaggagaaacgctaaccgcagactcctggtctgggccagaacctgcgccgaaggttgtattgaaggattttgataacactgtttcgcgatctgcgtgcaagaatcttccctcgaactggagggggtgtggttcttttaccctggagattacggtacaaagcgatgattatggttgcccctggctggcgtcgagccatatcgttgctaccacttttatcactaacgaaacgtattccccgccggatacgcgcagttcagtttgcccgaaagttcccgttgatacttttgatatctcctgggatgcgaacgtttcgaaacagaaaacaaccctcatgcttgatgccaccggtggcacggtgaatcgcacgttacatacctatttgatggaggggggaaaactgtgcgatggcagcaaatttgacaaccgtggcgcttattgccgttttgtctcatcgggtattacgctcaatgtgctgggctgcgaccagtcgagcgtcacgaccagcgccgttgatcatccgataaccgatgttgagcttcatgacattaatgtagcggtgaacacccgcaacattggctccgggcagttcacgtcgacctgtagcttccagtatattattgatgagctttaggggggctgggtgtttggcgaagattcacgctaacctggtatgaaccaaaaaaaaaccgggtggcggcttcgccttacccggcctacgttgtttctggacgttctcttttacagtttcgcaaacacccgacgcgcggcgtcaatagtattattaatgtcgtccatgctgtgtgcgaccgacataaagcccgcctcaaacgccgatggcgccagatatacgccttcctccagcatcaggtggaagaaacgcttaaagcgttccacgtcgcacgccatcacgtcctgatagcaggttacgctctcagcgtcggtgaagaaaatcccgaacatgccgccgacatggttgacgaccagtgggatccccgcctcctgcgccgcttcgcacagcccttccgccaggcgggtggtgagctcatccagcgtttcatgaatgccgggctgggcgacttcattcaggcaggcgaaaccggccgccatcgcaatcgggttgccggaaagggtgcccgcctggtaaaccgggcccgtcggcgccagcgcatccattacatcgcgacgaccgccaaacgcgcctaccggcatcccgccgccgatgattttacccagacaggtcaggtccggcacgacgccgtagtaatcctgggctccggccagcgctacgcgaaaaccggtcattacttcgtcgataatcagcagcgcgccgaactcatcgcacaaggcgcgcagacctggcagaaattccggcagcggcgggacgcagttcatattgcccgccacgggttcgacgatgatactggcgatttcctgcggatattgttcaaatgccgcgcgcactgacgtcagatcgttataagtgcaggtcagcgtatgtttcgcgaaatctgccggcacgcccggcgagttcggctgaccgagcgtcagcgcgccagaaccggctttgaccagcagacagtctgcgtggccgtggtagcagccttcgaatttgataatcttatcgcggccagtaaaaccacgcgccaggcgaatagcgctcatcgtcgcttcggtgccggagttcaccatgcgcaccatgtccatggtcggcaccaggttggtgaccagttccgccattttcacttccatttcggttggcgcgccgaagcttaaaccgcgctccgcagcttcgatcaccgcattgcggatagccggatggttatgccccagtaccattggtccccaggaaccgacatagtcgatatacgctttgccatcgacatcataaagataagcgccgtccgctttttcgataaacagcggggtgccgcccacgccagtgaaggcgcgaacaggggagttcacgccgccggggatcagctcgcgggccgcgctatagagattttcagacttactcatggaaagattcctggttcgtagaaaaagtgaatacccgctattctaagttattcagagaaggttatgaaagttttacgcatttgaaacaatacgatttgcaggggattttcgcggcgttggcgagtagaatgccgactttagatttgtattaccaattaatgatcttctgatgaaaacagacacttccacctttttagctcagcaaattgtgcgtttacggcgcagagatcagattcgccggttaatgcagcgggataaaacgccgctggccatcctgttcatggcggccgttgtcggcacgcttaccggactggttggcgtcgcctttgaaaaggcggtttcctgggtacaaaacatgcgcattggcgcgctggttcaggtcgcggaccatgcgtttttgctttggccgctggcctttatcctttcggcgttactggcgatggtcggctactttttggtgcgaaaatttgcgccggaagccggcggctcgggtatcccggaaattgaaggtgcgctggaggagttacgtccggtgcgctggtggcgcgtgttgccggtgaagtttatcggcgggatgggaacgttgggcgcaggaatggtattagggcgcgaagggccaacggtgcaaatcgggggcaacctggggcgcatggtgctggatgtttttcgtatgcgcagcgccgaagcgcggcatacgttgctggcgaccggcgcggcggcggggctctctgcggcgtttaacgcgccgctggcgggtatcctgtttattattgaagagatgcgcccgcagtttcgctacaacctgatttcgattaaagcggtgtttaccggcgtcatcatgtcgagcattgtgttccgcatatttaacggcgaagcgccgattattgaagtcggcaaactgtctgatgcgccggttaacacgctgtggttataccttatcctcggtattatttttggctgcgtcgggccggtatttaattcgctggtgctgcgtacccaggatatgtttcagcgctttcatggcggcgaaattaaaaaatgggtgcttatgggcggcgcgatcggcggcctgtgcggtattctggggttgattgagccggccgcggcaggcggcggatttaaccttattcctatcgccgcggcaggtaattttagcgtcgggctactgctgttcatctttattacccgggttgtcacgacgctgctttgcttttcttccggcgcgccggggggcattttcgccccgatgctggcgctgggaacgctgcttggtacggccttcggtatggcggcggcagtgcttttcccgcagtatcacctggaggccggtacctttgcgattgccgggatgggggcgctgatggcggcgtcggtgcgcgccccgttgacagggattgtgctggtgctggagatgaccgataactatcagctcattttgccaatgattatcacctgtcttggcgcgacactattagcccagtttttgggcgggaaaccgttatactcaaccatcctggcgcgcactctggcgaagcaggatgcggaacaggcggcgaaaaaccagaatgcgcctgcggacgagaatacttgaacgaattaccagggtattagataatgactgccaatattgggtgaaaatttatccaattaccgatgtcgtttggagcaaaatatgagtgatgacgtagcgctgccgctgcagtttaccgacgcagcagcgaataaagtaaaaagtcttatcgctgacgaagataacccgaatctgaaactgcgcgtgtatatcaccggcggtggttgcagcggcttccagtatggttttacctttgacgatcaggtgaacgaaggggatatgaccatcgaaaaacagggcgttggcctggtggttgacccgatgagtttgcagtatctggtgggtggttcggtagattataccgaaggtctggaaggttcccgcttcattgtaaccaacccgaatgcgaaaagtacctgcgggtgtggctcttccttcagcatttgattgctgttcgttgtgccggatggcgacgcgagcgtcttatccggcctacaggaaagatgttccaggcccgataagcgtagcgccatcgggcaaaacaatatcaacgtccgttttcatccagggcaaacgtcggcaatttcaaatgccagcgaatggccgccagccgaatgaacagcgtgaccaccatacccatcatgctggcgctttccagcggtactgaaaacgtataaaacgcggtggcgtgaacaatcccgccgataatacaggccgtggcatagatttcggtgcgtaggatcatggggatctcgcgtgccagaacatcgcgaataatcccgccgccgacgccggtaatcacgcccatacagacagccactaatggccccgtttcagcgaggaaggctttattcaccccaatgccgacaaacaccgccagcccgaccgcatccagtaccggcaacatccatttcggtagacgtcttggctggcgaaccagtaggatggtcagcatactggtgaccatggcgacgaccaggtcggtaggatctttaacccagaataccgggccgttatccagcgccatatcgcggattgtcccgccgccgacggcagtaacgacgccgagcaccaggacgccgaacgggtccatacgtaatttcccggccagcaacacgccagagatagcaaatacagccgtgcctacaatatccagccaatagacgagcattgtcgaatccccactgggagcctggtaagacaggctctaattcacctgtgaaagcgcattacagagttgttttgcggcgaggataatacgcgggcttgcgcgttcaaaccagtcgctgttaagcggaataaccggaatttttaacaggtttccccagtattgttcaattttgagaatttcgcccgcttttccggccacgataatggcctggggatgccttgccagcacctgctcacggctgacttgcggccacggcacgcggctgtcagcaaagacgttttctccgccgcaggtcgtcaaaacctgatgttgaatagaccctttaccactggtaaacagaggattcatgccaaactgaagaaagacgcgctttttagctttaccggcatactcggcgttgagcgcggcgtactcgtttagcaatgtctgcgctgcctgctgagccttttccggctgcgggctccaggcggccagttgacggagcgtgtcggcgatctgttcgatggttaccgcgtccacccacatgaccttaatacctaatgacgtcagttggtttacctggcgttccgcattaccgccgcgccaggcgacgaccagatccggcttcagcgccacaatgcgttccagattcattccctgccaggtagagacttgttctattttttgcgcttcgggcgggtagtcggaatagctgctgacgccaacgggcgtaatcccggcggcaaaagcgagctccgtattggcgggagagagggtaatgacgcgcggcgcagcgtaaagccacaccgggagcgtaagcagcagggcgaccagcgccctgaacatttgcttagccatgcgccagtttctgtaccagcgtttcgaccatcagagtcgactgtttcgccgccaccgcgaggaattcgtcaaagctgaggtgcgattgctgatcggccacgtcagaaatagcgcgaaccaccacgaacggcacgttgaagttatggcagacgtgggcgatagcggtggcttccatctctacggcgaccgcgtcggggaagttatgccggattttcgccagcccgacggaaccgttaataaacgcgtcgccgctaacaataaggccgcgtaccgcgttcagattcagctctctgatgcaggattccgcggcggcgatcagtttgtcatcggccttaaatccggccggacagcccggtaattgcccgtattcatagccgaaagcggtcacatcagcgtcgtggtaacgcgcttcgtcagagacgacgatatcgccgaccttcagcgtggacgccagaccgcctgcggaaccggtattgatgatcacgtccggcttgcagtgctccagaagcaacgttgcgcccagcgccgccgcgactttaccgataccggatttcagcaacgccacttcggtgccgttcaactggccagtgtaaatttcgcagccgcccagcgtaatcgtctgacggttgtcaattttgtcacgcagcagcgtaacttcttcttccattgcgccaatgatgccgattttcatagatttactcgcgataagtcagttttgggggcatagtttatcatgcgcttatggggaagcgcatttctcaggcggggagaggatatggcatcgatcgatttccgaaataaaattaactggcatcgtcgttatcgttcaccgcagggtgtaaagacggagcatgagatcctgcggatttttgaaagcgatcgcgggcggattatcaactctccggctatacgccgtttgcagcaaaaaacgcaggttttcccgctggagcgcaatgccgcggtgcgtactcgcctgacgcattcgatggaggtgcagcaggtagggcgttatatcgcgaaagagattttaagccgtctgaaagagcaagaccgactggaggagtacggcctggacgcgctgaccggtccctttgaaagtattgtggaaatggcctgcctgatgcacgacatcggtaatccgccgttcggtcattttggcgaggcggcgatcaatgactggtttcgtcagcggctgcatccggaagatgcggaaagtcagccgctcacgcatgatcgctgtgtggtttcctcgctacggttacaggaaggcgaagaaaatctgaacgatattcgccgcaaggtacgtcaggatatctgccattttgaaggcaatgcacagggaattcgtctggtacatacgctcatgcggatgaatcttacctgggcgcaggtcggcggaattttaaaatatacccgtccggcatggtggcgagggccggtgccggattcccatcgctatttaatgaagaaaccgggctattatctttctgaagagaagtatattgcgaggttacgtaaagaactgcagttagcgccttacagtcgctttccattaacgtggattatggaagccgcagatgatatttcttattgtgtcgccgatcttgaagacgcggtagagaaaagaatctttagcgttgagcagctttatcaccatttatatcacgcgtggtgccaccatgagaaggattcgctgtttgagctggtggtaggaaatgcgtgggaaaaatcacgcgccaatacattaagccgcagtaccgaagatcagttttttatgtatttacgcgtaaatacattaaataaactggtgccctatgccgctcagcgttttattgataatttgccgcagatttttgccggtaccttcaatcaggcgttactggaagatgccagcggttttagccgcctgcttgaactctataagaatgtggcggttgagcatgtgtttagccatccggatgtagaacagcttgaactacagggataccgggtgatcagcgggttattagatatctatcagccgctattaagcttgtcgcttaacgactttcgcgagctggtggaaaaagaacggttgaaacgcttccccatagaatcgcgcttatttcagaaactttctacgcgccatcgtttggcctacgtggaagtcgtcagtaaattacccacggattcggcggagtacccggtactggaatattattatcgctgtcggttgattcaggattatatcagcgggatgactgacctttacgcatgggatgaatatcggcgtttgatggcggtcgaacagtaaatggacttttgtaaagatggacaataaatttttactttttccagaaactttattccggaacttcgcgttataaaatgaatctgacgtacacagcaattttgcgttacctgttaatcgagattgaaacacatgaaaaaaaccacattagcaatgagtgcactggctctgagtttaggtttggcattgtcgcctctgtctgccacggcggctgaaacgtcctcttcagcaatgactgcccagcagatgccaagcctggcaccgatgctcgaaaaagtgatgccatcggtggtcagtattaatgttgaaggtagcaccacggtgaatacgccgcgtatgccgcgtaatttccagcagttctttggcgatgactccccgttctgccaggacggttctccgttccagaattctccgttctgccagggcggcggtaacggcggcaacggcggtcaacaacagaaattcatggcgctgggctccggcgtaattattgacgccgcgaagggctacgtcgtcaccaacaaccacgtggttgataacgccagcgtgattaaagtacagcttagcgatgggcgtaaattcgatgctaaagtggtgggcaaagatccgcgttctgatatcgcgctgattcaaattcagaatccgaagaacctgacggcgattaagctggcggactccgacgcgctgcgcgtgggggattataccgtcgctattggtaacccgtttggtctgggcgaaacggtgacgtcaggtatcgtttcggcgctggggcgtagcggcctgaacgtagaaaattacgagaactttattcagaccgacgccgcgattaaccgtggtaactccggcggcgcgctggtgaacctgaacggtgagctgatcggtattaacaccgcgattctggcgccggacggcggcaacatcggtatcggcttcgctatccccagtaacatggtgaaaaacctgacgtcgcagatggtggaatacggccaggtgaaacgcggcgaactggggatcatggggactgagctgaattccgaattggcgaaagcgatgaaagtcgacgcccagcgaggcgcgttcgtcagccaggtgatgccgaattcgtccgcggcgaaagcgggtatcaaagccggggatgtcattacctcgctgaacggtaaaccgatcagcagctttgcggcgctgcgcgctcaggtcggcactatgccggtcggcagcaaaatcagcctcggtctgctgcgtgaaggtaaagcgattacggtgaatctggaactgcagcagagcagccagagtcaggttgattccagcaccatcttcagcgggattgaaggcgctgaaatgagcaataaaggccaggataaaggcgttgtggtgagcagcgtgaaagcgaactcacccgccgcgcaaattggcctcaaaaaaggcgatgtgattatcggcgctaaccagcagccggtgaaaaatatcgccgagctgcgtaagattctcgacagcaagccgtcggttctggcgctgaatattcagcgtggtgatagttctatttatttgctgatgcagtaatcacctttgtcccccttccgccatggaagggggcaacacttttctgtgaaaccccccacaactccatacttatttgcaccgttttgtgcatttgcacaatgtcgagacctgtcatcttccttatgcttgtgctctgctcacaggagggatttatggctggctggcatcttgataccaaaatggcgcaggatatcgtggcgcgcactatgcgcatcatcgataccaatatcaacgtaatggatgcccgcgggcgcattatcggcagcggcgatcgggaacgtattggtgaattgcacgaaggcgcgctgttagtgctgtcgcagggccgggttgtggatatcgacgacgccgtggcgcgacacctgcacggggtgcgtcaggggattaatcttcccttacgtcttgagggcgaaattgtcggcgtgatcggcctcaccggcgaaccagagcacctgcgtaaatatggcgaactggtgtgtatgactgccgaaatgatgctggagcagtcgcggttaatgcaccttttggcgcaggatagccgtttgcgcgaagagttggtgatgaacctgattcaggccgaagaaaatacgccggcgctggtggaatgggcgcagcgtttggggatcgatttgaaccagccgcgtgtggcggcggtggtggaagtcgacagcggccagcttggcgtcgatagcgcaatggcggaacttcagcagttgcagaatgcgcttaccacgccggagcgtaacaacctgatagccattgtttctctcaccgagatggtggtactcaaacccgccttaaactcgtttggtcgttgggatgctgaagatcatcgtaagcgcgtagagcagcttatctcgcgcatgaaagagaatggtcagctacgttttcgcgtggcgctgggcaattactttaccgggccgggcagtattgcacgctcataccgcacggcgcgcaccacgatgatggtcggcaaacagcgaatgccagagagccgcagctatttttatcaggatttgatgctgccggtcctgttagatagcctgcgtggcggctggcaggccaatgagctggcgcgcccgctggtaaaactcaaagcgatggataacaacgggttattacgtcggacgctgacggcgtggtttcgccataatgtccagccgctggcgacctctaaggcgctgtttattcatcgtaacacgctggaatatcggctaaatcgtatttcggaactgaccgggctggatttgggaaattttgacgatcggctgttgctgtatgtggcgctacaactggatgaacagcgttaagcccggcggcgctacgcttatcaggcctacggggatatatctgtaggccggataaggcgtaacacgtcgccatccggcaacacacagcttacttacgggtaagcttgtccagatcggcttcgatttcactgatcttattcgcgacgacgctttccaggtggcgcaagtcgtcgaggatcttacgtttgagatcgagttctgagcggtcgcgctggcagatttggtccagctcgtcaatcacatagcgtaggttagggctaatctcctgtacctctttataaccctgaccgatgccatcggccaccaccgttttacgctggcgtggatacttaaacttcacgcttttagcaaagaattcacctctatccttttgaaaatagattttcaggatatcgttattggcttcttgccgcaggctgtaacgatcgatttcctcaggattggtaatgcccagactttttagattgtcatacatagcggtatccttcatcacactataacttttgaataattaacgaaaaattggtttttcgccaccagtgtatacaaaaaaagcgcggttgatcgcagaagacgtctcggcaacgtcatgagcaaaagggcggcggttattgatagcttaagtaattcaacgcgatattccgtttatagagaaagcgtttgaagtcagtgtgggaaattgaccggaggcagtggtcgataaccttgagaggcggagtctatgtccggaacgtataatgctactattcgccgggtggtggtttccgcctggataggaaactccattgaatattatgattttctattatacggcctggcaagcgcgctggtatttggcccgcttttttttcctggcgccagcccattgactgcaacgttatcttcttttgccagtttcggcgtgggatttatctcccgaccgctgggcgcgctattttttggcaacaggggagatacgcttgggcgtaaaaacacgttattaattacgttagggggggatgggcgcggtcacgtttctcatcggttgcctgccttcttacgccagtattggcgcgctggcgcctgctttactggttattctgcgttttctacagggatttatggttggaggcgaatggggaggcgccatgttgatggtcgtggaatatgctgctggaaagcaccgggggcggttaagcgcgctatcgcaaacaggaggactcacgggacaattattggcgacaggcgtatttatagtcgtgacccaattaccgcaggaggcgttgttatcgtggggatggcgtattccttttctgctcagtgcgcttttggtgttgcctggattatatatgcgtcatcgtctggatgagacgcctgtcttccgtgcgtttaaaaagcagcaggccattaatcataggcagcaaagagaagaaaggccggtggtcaaagtagtacgagaacaatggcgcagcattttgctgattataattctgcgttttgcggaaagcgttcccttttttcttgctaccgtcttcgcggtttcctgggcgacgacgcagcttgggattgccagcctgactattctgtacattgtaatgttcacctgtctgctggcgtatcccatgcacgtgctatttggcatcatgtcggatcggcgtggctgccgtcaggtgtatattttcggcgcgctttttgtcgcggcaatggcttttccctttttctggctgctggaaagccgttcgctcatactgatgacaatgggctacgttctgcttattaacattggtcataattcactgaatgccgtgcaaccttcttttttcgccggactgtttcatccgcctgtacgctacagcggttcatcaattggcgctcagttgggggcggttgtggcagggggattcacgccgtttatcgctaaagcgttaagcgcagtctatgataacagttgggcgttggttgccggttatgtcgttttgactgcgttggcttcggcgtttgcggcaaagattgcgccggaaaccgtgttaccgcattcgccgtaatgcaaaggggggctgtcgcccccgcttttcactcgcttaatcaatagtgcgcaataattcgttaatgcccactttaccacgcgttttggcgtcgacttttttcacgatcaccgcgcagtacaggctgtacttaccgtcttttgacggcaggttgccggaaacgaccacggagcccgccggtacgcggccatagtgaacttcaccggtttcgcgatcgtagattttggtactctggccgaggtatacgcccatggaaatgacggaaccttcttcgacaatgacgccttccacgacctcagaacgcgcgccaataaagcagttgtcttcaatgatggttgggttagcctgcagcggctccagtacgccgccgatacccacgccgccggaaaggtgaacatttttaccaatctgcgcgcaggaacccaccgtcgcccaggtgtcaaccatggtgccttcgtcaacgtaggcgccgatgttaacgtaagacggcatcagcacggtgttgcgggcgataaatgcgccctgacgaacggccgcaggcggaacgacgcggaagccttctttctgaaaacgcgcttcgtcgtaatcagcgaatttcatcgggactttatcgaagtagcggctttccgcaccgtcgataacctggttatcgttaatacggaaagagagcagaaccgctttcttcaaccactggtgagtgacccactgaccgtcgattttttctgcgacacgcagcgcgccggaatcaagtagagaaatgacctggtttactgcctctcgggtcacggtatctacattaggcggcgtaatatcggcgcggcgctcaaaagcggtctcaataacgttctgtaactgctgcattgttaaactctttcatataaataaacacactaccctttatcgtttggattgagggccgctgtcaaccgttgttgcacctcaagttgcagcacattattaagtgcgcgccgatccgctgtggcgattatgaataaatcttctactcgttcaccaatggttgtaattcgggcgccatgaagcgaaattcccagatcggcaaaaatttgtccgaccctggccagcagaccaggttgatcgagcgcgatcaattccatgaatgattttctgtcggtatgggtgggcagaaaattgacttccgtttcgaccgtaaagtgccgtaactttgccggttgccgacgcggctgcggcggctgccagctacgctgcgtaatggtttgttcaagaccggtgcgaataacgtcatggcgatccgccgccagcgggctgccgtctggttccagaacaataaacgtatccattgccatgccgtcgcgagtggtaaagatctgcgcgtcatggacgcttaaattacgcctgtccagctcggcgcagacggcggcaaacagatagggtctgtccggactccagataaaaatttcggttccaccgcgcgtggcctgcggactgagcaacactaacggttggcgcagatcgtgctgcaataaatggcgtgcgtgccaggcgagctgatttggactatgacgaacaaaatagttagcgcgacagcgggtccagattttgtgcagcgcggcttcatcaatattgtccattcgcagcagcgccagcgcctgaagctgatggtgacgcacgcgctcacgcatatccggcgtattttgcattccacgcctgagctgtttttcagtggcgaagtacagctcgcgcagcaggctctgtttccagctattccacaaggtttcgttggtcgcgcagatgtccgcgacggtcaggcagaccagaaaacgcagccgtgtttcggtttgcacctcttcggcaaactgcttgatgacttccggatcctggatgtcgcggcgctgggcggtgactgacattagcaggtgttggcgcaccagccacgcgaccagttgcgtttcgcgtgagttcaaaccgtgcagttcggcgaaggtgagtacatcctgcgcgcccagtacggaatggtcgccgccgcgtcctttcgcaatatcgtggaacagcgcggcgatcaggatcagttccggatggggaagccgcggccagagatcgacgcatagcggatggcgctggcgcgtctcttctttcgcaaagctctccagtttgagcattacgcggatggtgtgttcatccaccgtgtatgcgtggaacaggtcaaactgcatttgtccgacgatgtgcgaccactgcggcatataagcccacagtacgctgtggcgatgcatgggcagcaggccgcggctgaccgcgccgggatggcgcagcatactcagaaacagagtgcgcgcctccgggatgtaacacagcggttggctcaggtggcggcgggcgtggcgcaagtggcgtaacgtcgtagagtagatgccggtgatcgcgctattgcgcaccatcatataaaacatgcgcaggatcgcttgcggttcgcggataaacagcgtgtcgtcacgcagatcaataagcgtgccgcgcagttgaaactcatcgtcaacaggacgtggtttttcatccgcaggtagcgccagaatcgcctcgtcaaatagctgaagcagcatctgattaagttcgctcacccgacgcgtaacccggaagtagtctttcatcatccgctcaaccggatcattgccctcgccgctgtagttaaggcgttgagcgacgcttaactggcggtcgaacagcaggcggttatcgtagcggctgaccaccagatgtagcgcaaagcgaatgcgccacaggatatgcaggcactcgttgagctccgcgcgctcagcgggggttaaaaagccgaatcccaccatctcatcgagcgaggtagcgccgaagtgacgtcgggcgacccactgtaacgtatggatatcgcgcaggccgccggggctgcttttaatatccggctccagattatagctggtaccgtgatagcgctggtggcgctggttctgctcttctactttggcggcgtaaaatttgtcggacggccaaaaaccttcgctgaaaatatgtttttgcagtgccagaaacagagcgacatcaccgatcagcaggcgcgtttcgatgaggtttgtcgcaacggttaaatcagacagaccttccagcagacactcttccagcgtacgtacgctatgcccgacatccagcttgacgtcccataataaagtcagcagctcgccgaccttttgcgcctgttcatcgggcagctttttgcggcttaaaatgagcagatcaatatcggaaagcggatgcagttcgccgcgtccatagccgccgacagcgaccagcgccagatcggcaatctgaccgaaaccggcctcaatccacaggcgttgcaataactggtcgataaattcggttcgggcttcaataagctgttcagcacaaatgccgctgtcaaatgcctctcccagccagtgttgaaagatgtcgatgcgggctttgataccggcgacggtcagttcagcgcgcggccagacgccagggttttgcggctggtcagggagggtggggagtgcggtattcgcgtgctgttcaggaagagtattcatatgcgccacccattaaaaagccggataatggcgtgaacgccttatccggcctacgtatttatcttcatccttcaagttgcttctacgttggctgcgctcgttcactccagtcacgtacttatgtacgctcctgaagattcactctcttgccgccttgaggcaactcgaatgattttgagtaaaggtgtaatttgtaggcctgataagatgcgaaggcatcgccatcaggcaaaacattattcgtcgtgtgtgatgatcgccgggatggtgtcatctttacgcagcgtcagaatttcacagccgttttccgttaccacaatagtatgctcgtactgagcagacaagctgcgatctttggttttcaccgtccagccgtctttcatggtgcggatacggtaatccccggcgttcagcatcggttcaatggtaaaggtcatgccaggctgcaacacgacgccgccatcgtctgcatcataatgcagcacctgcggttcttcatggaagccgcgaccaataccgtgtccgcagtattcacgtaccacggagaaaccttcgccttcggcatatttctggatggcggcgccaatggtgcgcaggcggatgcccggtttcaccattttgatgcccagatacaggctctcttgcgtgacgcggcacagacgctcgccgagaatggtcggtttgccgacgataaacatcttcgaggtatcgccgtggaattcatctttaatcacggtcacgtcgatgttgacgatatcaccatctttcagatgtttagcgtcatccggaatgccgtggcacaccacttcattaatagagatacagacggatttcggataaccgtgatagccgaggcaggcggagatcgcgtgttgttcgttaacgatgtaatcgttacagatacggtccagttcgccggtggtgacgcccggtttgatatacggttcgatcatttccagcacttcggctgccagacggcccgcgacgcgcattttttcgatgtcttcagatgtcttgatagagatagccatgaattctgtccatcagtgccgatgatttcggcaataattgtgtaagtgctgacaatggtatcagtcaggggtgtaccctgccaaattgagaatcattctgaacttcgcctttcgtgccacaggtgcgttggcgacattttttcaccccagtcactgactggccgtaagctcccggggatgcaaaaatttgctgcctgcctgtaacacgaaattcatcgttcaattcagcactgagtgccaacaattattggtgtcggtggcgtatttgtggtataaagcgcgccggacttccgatccattcgaagactacacacgatggacgggagcgacaaatctcactttgtgtaacaacacacacgtatcggcacatattccggggtgccctttggggtcggtaatatgggatacgtggaggcataaccccaacttaatctatagaggttttaaatcatggcaactgtttccatgcgcgacatgctcaaggctggtgttcactttggtcaccagacccgttactggaacccgaaaatgaagcctttcatcttcggcgcgcgtaacaaagttcacatcatcaaccttgagaaaactgtaccgatgttcaacgaagctctggctgaactgaacaagatctctgctcgtaaaggtaaaatccttttcgttggtactaaacgcgctgcaagcgaagcggtgaaagaagctgctaacagctgcgaccagttcttcgtgaaccatcgctggctgggcggtatgctgactaactggaaaacagttcgtcagtccatcaaacgtctgaaagacctggaaactcagtctcaggacggtactttcgaaaagctgaccaagaaagaagcgctgatgcgtactcgtgagcttgagaaactggaaaacagcctgggcggtatcaaagacatgggcggtctgccggacgctctgttcgttatcgatgctgaccacgagcacattgctatcaaagaagcgaacaacctgggtatcccggtatttgctatcgttgataccaactctgatccggatggcgttgacttcgttatcccgggtaacgatgacgcaatccgtgctgttagcctgtacctgggcgctgtcgctgcaaccgttcgtgaaggccgttctcaggatctggcttcccaggcggaagaaagcttcgtagaagccgagtaataaggcttgataactccctaaaatagttcgagttgcaggaaggcggcaagctcgagaattcccgggagcttacatcagtaagtgaccgggatgagcgagtgaaggcaacgcgcctgcggctcgaaatatgaaggggagagcccttatagaccaggtagtatcacgtttggttagggggcctgtatatggccccctttttcacttttatatctgtgcggtttgatgccgggcagatcaaatctttcgaggattttagaatggctgaaataaccgcatccctggtaaaagagctgcgtgagcgtaccggcgcaggcatgatggattgcaaaaaagcgctgactgaagcgaatggcgacattgagctggcaatcgaaaacatgcgtaagtccggcgctatcaaagcggcgaaaaaagcaggcaacgtggctgctgacggcgtaatcaaaaccaaaatcgacggcaacgtcgctttcattctggaagttaactgccagactgacttcgtggctaaagatgctggcttccaggcatttgctgacaaagtgctggacgccgctgttgctggcaaaatcactgacgtagaagttctgaaagcacagttcgaagaagagcgcgttgctctggtagcgaaaattggcgagaacatcaacattcgtcgcgtcgcttccctggaaggcgacgttctgggttcttaccagcacggtgcgcgcatcggcgttctggttgccgctaaaggcgctgacgaagagctggttaaacagctggcgatgcacgttgcggcaagcaagccggaattcgttaagccggaagacgtgtctgctgacgtggtagagaaagagtaccaggtacagctggacatcgcgatgcagtccggtaagccgaaagaaatcgcagagaaaatggttgaaggccgcatgaagaaattcaccggcgaagtttctctgactggtcagcctttcgtcatggaaccgagcaaatctgttggccaactgctgaaagagcacaacgctgacgtgactggcttcatccgctttgaagtgggcgaaggcattgagaaagtcgagactgactttgcagcagaagttgctgcgatgtctaagcagtcctgattttcctgaggagccgcctgagggcggcttctttttgcgcctctcttgtaaaatcagccgacgcctggcgtctgcgctgaaatgcgacgtacaatgtcgccggaattaactcatatcaatcgttgacagtctcaggaaagaaacatggctaccaatgcaaaacccgtctataaacgcattctgcttaaattaagcggcgaagctctgcagggtacggaaggcttcggtattgatgcaagcatactggatcgtatggctcaggagatcaaagaactggttgaactgggtattcaggttggtgtggtgattggcggtggtaacctgttccgtggcgcgggtctggcaaaagcggggatgaaccgcgttgtgggcgaccacatgggcatgttggccaccgtcatgaacggcctggcaatgcgtgatgcgcttcaccgcgcctatgtgaacgcccgcctgatgtcggcaattcctttaaacggcgtgtgcgacaactacagttgggccgaggcgattagcctgctgcgtaataaccgtgttgtgattctgtctgcaggtacgggtaacccgttcttcactaccgactctgcggcttgtctgcgcgggatcgaaattgaagcggatgtcgtactgaaagcgaccaaagtggatggcgtattcactgccgatccggcaaaagatccttccgcgaccatgtacgatcagctgacctacagcgaagtgctggataaagagctgaaagtgatggatctggcggcgttcacgctggctcgtgaccacaaactgccgattcgtgttttcaacatgaacaaaccgggcgcgctgcgtcgtgtggtgatgggcgaaaaagaagggacgttaatcacggaataattcccgtgagcgccaaatacgggtaagattctgttctattgacgggtcttattacctggcagaaattaaacgagactatacttagcacatctttatattgtgtgaccgtctggtctgactgagactagttttcaaggattcgtaacgtgattagcgatatcagaaaagatgctgaagtacgcatggaaaaatgcgttgaagcgttcaaaacccaaatcagcaaagtgcgcacgggtcgtgcttctcccagcctgctggatggtattgtcgtagaatactatggcactccgaccccgctgcgccagttggcaagcgtaacggtagaagactcccgtaccttaaaaattaacgtgtttgaccgttctatggggccagccgttgaaaaagcgatcatggcgtcagacctcggtttgaatccaagctctgcgggcaccgacattcgcgttccgctgccgccgctgaccgaagaacgtcgtaaagatctgacgaaaattgtccgtggcgaagcggagcaggcgcgtgtcgccgttcgtaacgtccgtcgtgatgcgaacgataaagtaaaagctctgctgaaagataaagcgatcagtgaagatgacgatcgtcgctctcaggaagaagtacagaaaatgaccgacgcggcaattaagaaagttgatgcggcgttggcagataaagaagcagaactgatgcagttctgattgatctgtacgcagatataaactcattccaccgctaacctggcggatgagtggtgtacaaagcgccgcgcagaagacattatcaggtctcctgtgcggcgttttgctttttattccgtttcaacacttctggacgtttcatgaagcaattaaccattctgggctcgaccggctctattggttgcagcacactggacgtggtgcgccataatcctgatagcttccgcgttatcgcgctggtggcgggtaaaaatgtcgcccgcatggcggagcagtgcctggagttctcgccgcgttatgccgtgatggacgatacgtcgagcgcagaacagctcaaaataatgcttcagcagcatggcagccgcaccgaggttctgagcggtcagcaggctgcctgtgagatggcggcgcttgatgaggtcgggcatgtgatggcggccattgtgggcgcggctggtttactgccgaccctggcggcgattcgcgcagggaagacgattctgctggcgaataaagaatcgctggtgacctgcgggcggctgtttatggacgaagtaaaacgcagcaacgcccggcttttacccgtcgatagcgaacataacgcgatttttcagagtttgccgcaatctattcagcataatctgggatacgctgaccttgagcaaaatggcgtaacgtcgattttgcttaccgggtctggtggcccgtttcgtgaaacgcccatgtgcgatctggcagcgatgacgccggatcaggcatgtcgtcatccgaactggtcgatggggcgaaaaatctccgtcgactccgccaccatgatgaataaaggtctggaatacattgaagcgcgttggttatttaatgccagcgcacgtcagatggaagtgttgatccatccgcaatcggtcattcattcgatggtgcgttatcaggacggcagcgtcctggcgcagcttggagaacctgacatgcgtacgcctattgcgcatacgatggcatggccgaatcgcgtcacgtccggcgcgcagccgctcgatttttgcaaactcagcgcgctgacgtttagcgcgccagattatcagcgttatccttgcctgaagctggcgatggaggcgtttgagcaaggtcaggcggcaacgacggcgctcaatgcggcaaacgaaatcaccgttgccgcgtttctggcgcaacagattcgttttaccgatatcgccgggctcaatttagcggtgctggagaggatggatttacaggaaccggcaagcgttgaggacgtattgcaggttgacgccatcgcgcgtgaagtagccagaaaacaagtgatacggctctcacgctgacgattatcccgcgacagaagatcgtgctatttgttagcgttgggcttcggtgatatagtctgcgccacctgatcgcaggtttttggcttttttcggtcaggttagccgtggttttacacggcttttttgtggatacacaaaatcattcaggacgcatcgggacggcaggcgagtacgttcccggcgtgcgcagacagcgcacgacaggggcgatgacgcgcggtcatccgcgaagcgaaccgaagagaatgtgtataaaggcttcagtattcctgagtaccgctaaatcctttcagggacaaaaaacgcgttatgttgtctgcaactcaaccagtaagcgaaaatttgccagcgcatggctgccgtcatgttgcaataattatggatggcaatggtcgctgggcgaaaaagcaagggaagatccgggcctttgggcataaagccggggcgaagtccgtccggcgagcggtctcttttgctgccaataacggtattgatgcgttaacgctgtatgcctttagtagtgaaaactggaaccgaccggcgcaggaagtgagcgcgttaatggagctgtttgtgtgggcgctggatagcgaagtcaaaagcctgcaccgccataacgttcgcctgcgtattatcggcgatatcagtcgattcaactcacgtttacaagaacgtattcgcaaatcagaagcgcttaccgcccataatacgggtctaacgctgaatatcgctgcgaattacggcggacgttgggatattgtccagggagtccgacaactggcggaacaggtgcaggctggagtgctgcgccccgatcagattgatgaagagagactaggccagcaaatctgtatgcatgagctggcgcctgtggatttagtaattaggactgggggagagcatcgcattagtaactttttgctttggcaaattgcctatgccgaactttactttacggatgttctttggcccgatttcgatgaacaagactttgaaggtgcgctgcatgcctttgctaatcgagagcgtcgtttcggcggtaccgagcctggtgatgacaaagcctgatgggggttgcttttgctgaagtatcgcctgatttctgcttttgtgttaatacccgcggtcatcgctgcgctttttttattgccgccggtggggttcgccattattacgctggttgtctgtatgctggccgcgtgggaatggggacagttaagcggtttcgccgcgcgttcacagcgggtttggctggcggtgctgtgtggtctgttattggcgctgatgctatttttgttgcctgagtatcatcacaacattcgtcaaccgctggttgagatgtcgctttgggcatcgttaggatggtgggttgtcgcgctactgctggtgctattttatcccggttcggcggcaatctggcgcaactcaaaaacattgcgtctcattttcggtttgttaactattgtgccatttttctggggcatgctggcgctgcgcgcctggcactatgacgagaatcattacagtggcgcaatatggctactctatgtcatgatcctggtctggggagcggactctggcgcgtatatgtttggtaaattatttggcaaacataagctggcgccgaaggtttccccgggtaaaacctggcaagggtttatcggcgggcttgctacggctgccgtgatctcatggggctacggtatgtgggcgaatctgaatgttgcgcctgttatcttgctgatttgctctgtggtggcggctctggcttctgtactgggcgacctcaccgagagtatgtttaagcgcgaagcaggaattaaggatagcggccacttgattccaggccatggcggcattctggaccgaattgacagtctgacggctgccgtaccggtctttgcttgcctgttgttactggtgttcaggacgctctaacggaaggttttatgctgagtattctctggaatctggctgcattcatcatcgcactgggcgtgctgatcactgtgcatgaatttggtcatttctgggttgcccggcgctgcggtgtgcgagttgagcgcttttccatcggttttggcaaagcgctctggcgtcgtaccgatcggtacggcaccgagtatgtcatcgccctgatcccgctgggcggctacgtcaaaatgctggatgagcgcgccgaaccggtagcgccggaattgcgtcgtcacgccttcaataacaaaacggtgggccagcgcgccgcaattattgccgcaggtccggttgcgaacttcatttttgctatctttgcttactggctggtctttatcatcggcgtccctggcgttcgtccggtcattggcgaaataacgcccaactcgattgctgcgcaggcgcaaattgcgcctggtacggaacttaaagccgttgatggtatcgaaacccctgattgggatgccgtgcgtttacaactggtgtccaaaattggcgatcagcagacgacggtgagcgtcgcgccgtttggtagcgaccagcggcaggataaaacgcttgatttacgtcactgggcatttgagcctgataagcaagatcctgtatcttctttagggattcggccccgcgggccacagattgaaccggtactgtcagaagtgcaggcgaattccgcagccagtaaagcgggtttgcaagcaggcgacaggatcgttaaagtcgatggtcagccgttaacgcagtggatgaaattcgtgacgtttgtacgcgataatcccggtaagccgttagcgttagagattgaaaggcaggggagcgccttgtcgttgacgttaacgccggatacgaaatcggttaacggaaaggcggaagggtttgcaggcgtggtgcctaaaattattcctctgccggaagagtacaagactatacgccagtatgggccttttagcgccatcctcgaagccacggataagacgtggcagttgatgaagctgacggtcagtatgctgggtaaattgataaccggtgatgtgaaactgaacaacctcagtgggccgatttctatcgctcagggggctgggatgtcagcggagttcggggtgatttattacctgatgttccttgcgctaatcagcgtgaacttagggataattaacctgtttccgctgcccgttcttgacggggggcatctgctgttcctggcgattgaaaagcttaagggcgggccggtatccgagcgggttcaagactttagttatcgcattggctcgattttgctggtgttgttaatggggcttgcacttttcaatgatttctctcggttgtaagagagttagttaggaagaacgcataataacgatggcgatgaaaaagttgctcatagcgtcgctgctgttcagcagcgccaccgtatacggtgctgaagggttcgtagtgaaggacattcatttcgaaggcctgcagcgagtcgccgttggtgcggctctcctcagtatgccggtgcgcacaggcgacacggttaatgatgaagatatcagtaacaccattcgcgctctgttcgccaccggcaactttgaggacgtccgcgtcctgcgcgatggtaatacccttctggttcaggtaaaagaacgtccgaccattgccagcatcactttctccgggaacaagtcggtgaaagatgacatgctcaagcaaaacctcgaagcgtctggcgtacgtgttggcgagtctctggatcgcaccacgttgtctgatatcgaaaaaggtctggaagacttttactatagcgtaggtaaatacagcgccagcgttaaggcggtcgtcacgccgctaccgcgcaaccgtgttgatcttaaactggtgttccaggagggcgtatcggcgaagatccaacagatcaacatcgtcggtaaccatgcctttagcaccgaagaactcatttctcatttccagttgcgtgacgaagtgccgtggtggaacgtcgtcggcgatcgtaaataccagaaacagaagctggcgggcgaccttgaaaccttgcgcagctactatctggatcgcggctacgcgcgtttcaatattgactccacgcaagtgagtctgacgccggataagaaagggatctacatcaccgtcaatatcaccgaaggcgatcagtacaagctttccggggttcaggtgagcggtaacctggccggacattccgctgaaattgagaacctgacgaaaattgaaccgggcgagctctataacggcaccaaagtgaccaaaatggaagatgacatcaaaaagcttctgggtcgctatggttacgcctatccgcgcgtgcagtcacagcctgaaattaacgatgctgacaaaaccgtaaaactgcgcgtaaacgtcgatgcgggcaaccgtttctacgtgcgtaagatccgctttgaaggcaacgacacctcaaaagattccgttctgcgccgtgaaatgcgccagatggaaggggcgtggctgggcagcgacctggttgaccaggggaaagagcgtctgaaccgtctcggcttctttgaaaccgtcgacaccgacacgcagcgcgttccgggtagcccggatcaggttgatgtggtgtacaaggtgaaagagcgcaacaccggtagctttaacttcggtatcggttacggtacagaaagcggcgttagcttccaggccggcgttcagcaggacaactggttaggtaccggttattccgtggggattaacggcaccaaaaacgactaccagacctacagcgaactgtccgttactaacccatactttaccgttgacggcgtgagcctcggtggtcgtatcttctataacgacttccaggcggacgacgcggatctatccgactataccaacaagagttacggtacggatgtgacgcttggcttccccatcaacgagtacaacacgttgcgtgctggtctgggttatgtccataacaaactgtccaacatgcagccgcagatcgcgatggatcgttatcttgagtcgatgggacaatctgctgataccagcagttttgccgctgatgacttcacctttaactacggctggacctataacaaacttgaccgtggttatttcccgacggacggttcgcgcgtcaatctgacggggaaagtgacgattccaggttccgacaacgaatactacaaagtgtcgctggataccgcgacctatgtgcctatcgataacgatcacaagtgggtggttctggggcgtactcgctggggttacggcgatggtttaggcggcaaggaaatgccgttctatgagaacttctatgccggtggttccagtaccgtgcgtggtttccagtcgaatactatcggcccgaaagcggtctataaaaatggcgcccatactagttgggacgataatgatgattacgaagactgtactcaggaatcaggctgtaaatcagatgatgcggtaggtggtaatgccatggctgtcgccagcctggaatttattaccccgacgccgttcatcagcgaaaagtatgccaactcggttcgtacctccttcttctgggatatgggtaccgtttgggatacgaactgggatccgtcatctgcgccgtcagatgtaccggattacagcgatccaggcaacatccgtatgtccgcgggtatcgcattacaatggatgtccccattggggccgttggtcttctcctacgcccagccgtttaaaaagtacgatggagacaaagccgagcagttccagtttaacattggtaaaacctggtaattgttcactgcaaaggaatgcattggtagtgtagcgatgacttttggcgatgcccccagggatcgccaggccacgcaaagagctgtaccttcgggtgcaaatgggatggtaaggagtttattgtgaaaaagtggttattagctgcaggtcttggtttggcgatggtaacgtccgcacaggctgctgacaaaattgcaatcgtcaacatgggtaatctgttccaacaggttgcgcagaagacgggtgtatccaatacactggaaaacgaatttaaaggccgtgcggctgaactgcaaaaaatggaaaccgatctgcaatctaaaatgcagcgtctgcaatccatgaaagcaggtagcgatcgtactaagctggaaaaagacgtgatgtctcagcgccagactttcgcacaaaaagcgcaggcttttgagaaagatcgcgctcgtcgttccaacgaagaacgcaacaaactggtgactcgtatccagactgcggtgaaaaaagtggctaacgaccagagtatcgatctggtggtagacgcaaacaccgttgcttacaacagcagcgatgtgaaagacatcaccgctgacgtactgaaacaggttaaataagtaatgccttcaattcgactggctgacttagcagaacagttggatgcagaattacacggtgatggcgatatcgtcatcaccggcgttgcgtccatgcaatctgcaacaacaggccacattacgtttatggtgaatcctaagtaccgtgaacacttaggtttatgccaggcttctgcggttgtcatgacgcaggacgatcttccttttgctaagagtgcggcgctggtagttaaaaatccctacctgacctacgcgcgcatggcgcaaattttagatactacgccgcagcccgcgcagaatatcgcgccaagcgccgtgattgatgcgacggcaacgctgggtagcaatgtttcagtcggcgcgaatgcggtgattgaatctggcgtacaactgggcgataacgtggttatcggcgcaggctgtttcgtcggaaaaaatagcaaaatcggggcgggttcacgcttgtgggcgaacgtaacgatttaccacgacattcagatcggtgagaattgcctgatccagtccagtacggtgatcggcgcggacggttttggctacgctaacgatcgtggcaactgggtgaagatcccacaactgggccgggtcattattggcgatcgtgtcgagatcggcgcttgtaccaccattgaccgtggcgcgttggatgatactgttattggcaatggcgtgattattgataatcagtgccagattgcacataacgtcgtgattggcgacaatacggcagttgccggtggcgtcattatggcgggtagcctgaagattggccgttactgcatgattggcggcgccagcgtgatcaatgggcatatggaaatatgcgacaaagtcacggtaactggcatgggtatggtgatgcgtcccatcacggaaccgggcgtctactcctcaggcattccgctgcaacccaacaaagtatggcgtaaaactgctgcactggtgatgaacattgatgatatgagcaagcgtctcaaagcgattgagcgcaaggttaatcaacaagactaacgttccgccttgtagttgccattcttttccggcctgtcacattcatacgattgcggcaggccgtgttattattgcctttttgtatatttggacaggaagagtattttgactactaacactcatactctgcagattgaagagattttagagcttctgccgcaccgttttccgtttttactggtcgatcgcgtgctggactttgaagaaggtcgttttctgcgtgcggtgaaaaatgtctccgtcaacgagccgtttttccaggggcatttcccgggcaaaccgattttgccaggcgtgctgattctggaagcgatggcgcaggcaaccggtattctggcgtttaaaagcgttggtaaactggaacctggcgaactgtattatttcgcgggtattgatgaagcgcgctttaagcgtccggtggtgccaggcgatcagatgatcatggaagtcactttcgagaaaacgcgccgtggcctgacccgctttaaaggggttgcgctggtcgacggtaaagtcgtgtgcgaagcaaccatgatgtgtgctcgtagccgggaggcctgattcgtgattgataaatccgcctttattcatcctaccgccattgtggaagacggcgctgtaattggcgctaatgcccacattggtcccttttgtattgttgggccgcaggtcgaaattggtgagggaaccgtactgaagtctcatgtggtcgtgaatggtcaaaccaaaatcggccgcgacaacgagatttatcagtttgcctccatcggtgaagtgaaccaggatctgaaatatgcgggtgagccgacccgtgtggaaattggcgatcgtaaccgcatccgcgaaagcgtcaccattcatcgtggtacagtgcagggcggtgggttgacgaaggtgggtagcgataacctgctgatgatcaatgcgcatgtcgcacatgattgtacggtaggtaatcgctgtatcctcgccaacaacgccacgctggcggggcacgtatcagtcgatgattttgcgatcatcggcggtatgacggcagttcatcaattctgcattatcggtgcgcatgtgatggtcggcggctgctccggcgtggcgcaggatgtccctccgtatgtgattgcgcagggtaaccatgcgacgccgttcggggtaaatatcgaagggctgaagcgtcgcggctttagccgtgaagggctggtggcgattcgtaatgcctacaaactgttgtaccgcagtggtaaaacgctcgacgaagcgaagctggaaatcgctgaacttgctgaaaagcatccggaagtgaaggcgtttaccgagttctttgagcgttcaacgcgcggtccgattcgttaatggcggcacagcgtcctttaacgattgccctggtcgccggtgaaacgtccggcgatattcttggcgcaggcttaattcgtgcgctgaaagcgcgcgtacccaacgcccgttttgtgggcgttgcggggccgcgtatgcaggccgaagggtgtgaagcctggtacgagatggaagagctggcggtcatgggcattgttgaagtgctcggacgtttacgccgtttgttgcatatccgcgccgatctgacccgccgttttaccgaactcaagcccgatgtctttgtcgggattgatgcccctgatttcaatattaccctcgaaggtaatctgaaaaaaaaagggattaagaccattcattatgtcagcccgtccgtttgggcctggcgacagaaacgcgttttcaaaataggcagatccacccatatggtgttggcttttctgcctttcgaaaaagcgttttacgataaatttaacgtcccgtgccgctttatcggtcacaccatggcggatgccatgccgctggacccggataaaaatgcggcgcgcgacgtgctgggtatcccgcatgacgcccattgtctggcgctactgccaggcagccgtggcgcggaagtggaaatgctcagcgccgatttcctgaaaaccgcacaattgctgcgacagcgctatcccgatctggaagtggtagtgccgctggtgaacgcgaaacgccgcgagcagtttgaaaaaattaaagcggaggttgcgccggatctcgccgttcatttgctggacggcatggcgcgcgaggcgatgatcgccagcgacgcggctctgctggcctcgggtacggcggcactggagtgtatgctggcaaaatgcccgatggtagtgggatatcgtatgaagcccttcactttctggctggcgaaacgtctggtgaaaacggagtatgtgtctttgcctaacctgctggcgggaagagaattagtcaaagagctgttgcaggaagagtgcgaaccgcaaaaactcgccgaagcgctgttgccgctactggcgaacggtaaaaccagccatgcgatgcacgacaccttccgtgaattgcatcagcagatccgctgtaatgccgatgagcaggcggcagatgccgtcctggagttagcacaatgatcgaatttgtttatccacacacccatttagtggcgggtgtggatgaagtgggccgtggcccgctggtgggcgccgtagtgaccgccgccgtgatcctcgatccggcgcgtccgatcgtcggtctgaatgattccaaaaaattgtctgaaaagcgtcgtctgtcattgtatgacgagattaaagaaaaggcgttaagctggagtctggggcgcgcggaagcgcatgaaattgatgagctgaatattttgcacgccaccatgctcgccatgcagcgcgctgtcgctggtctgcatattgcgccagaatatgtgctgatcgacggcaatcgctgtccggagctgcctgtgccgtcaatggccgtggtgaaaggcgacagccgcgtggcggagattagcgcggcgtctattctggcgaaagtcacccgcgacgcagaaatggcggcgctggatatcgtttttcctcagtatggctttgcgcagcacaaaggctatccaaccgcttttcatctggaaaagttggcccagtatggcgcgacggcgcaccaccgacgcagttttgcgcctgttaaacgcgctctgggacttgtgtcctgattcttgtatcgagaaatctgaagatgtctgaaccacgtttcgttcacctgcgggtgcacagcgactactctatgatcgatgggctggcgaagaccgggccgctggtgaaaaaggcggcctcattaggtatgcctgcgctggcgatcaccgattttaccaacctctgcggtctggtgaagttctacggagcgggtcatggcgcgggcattaaacccatcgtcggggcggactttaacgttcacaacgaactgctgggagatgagctgactcatctgacggtactggcggcgaataatacgggataccagaacttgacgttgctgatctcgaaagcgtatcagcgcggctacggcgcggcaggcccgattatcgagcgcgactggctggtagagcttaaagaaggtttgatcctgctttccggcgggcgcatgggcgacgtaggccgctgtctgctacgcggcaaccaggcgctggtggaggagtgcgttgctttctatgaagcgcattttcccgatcgctacttcctggaactgatccgtaccggcagacaggatgaagagacctatctccatgctgcggttgagctggctgaggcacgtggtttgccggttgtcgcgacaaacgatgtccgttttcttgaaagcgatgattttgacgcccatgagattcgtgtcgcgatccacgacggtttcacgctcgacgatcctaaacgtccacgcaattattcaccgcagcagtatatgcgcagtgaagaagaaatgtgcgagctgttctccgatattccggaggcgctggaaaatacggtggagattgccaaacgctgcaacgtaacggtgcgtctgggtgaatatttcttgccgcagttcccgaccggcgatatgaccaccgaagattatctggtcaaaaaagcgaaagaggggctggaagagcgtctggctttcctgtttccggacgaagaagagcgcaaaaagcgtcgcccggaatatgacgagcgtctggatattgaactacaggttatcaaccagatggggttccctggctacttcctcatcgtgatggagtttatccagtggtcaaaagataacggcgtgccggtagggccgggacgtggttccggggctggttcgctggtggcctacgcgctgaaaattaccgaccttgatccgctggaatttgacctgctgttcgaacgtttcctgaacccggaacgtgtctcgatgcctgacttcgacgttgacttctgtatggagaaacgcgaccaggtgattgaacacgtcgcagatatgtacgggcgtgatgcggtatcgcaaattatcaccttcggtacgatggcggcgaaagccgttatccgcgatgtgggccgcgtgctggggcatccgtacggttttgtcgatcgtatctcgaagctggtgccgcccgatccgggcatgacgctggcaaaagcctttgaagcggaaccgcaactgccggaaatttacgaggcggatgaagaggtcagagcgctgatcgatatggcgcgtaagctcgaaggcgtcacgcgtaacgccggtaagcacgctggcggcgtggtcatcgcgccgaccaaaattaccgactttgcgccgctgtactgcgatgaagagggcaagcatccggttacccagtttgataaaagcgacgtggaatatgccgggctggtgaagttcgacttcctcggtttgcgtacgctgactatcatcaactgggcgctggagatgatcaacaagcggcgggcgaagaatggcgagccaccgctggatatcgctgccattccgctggacgataaaaaaagcttcgacatgctgcagcgctcggaaaccacggcggtcttccagcttgaatcgcgcggcatgaaagatctgatcaaacgtctgcagccggactgctttgaagatatgatcgcgctggtggccctgttccgtcccggcccgttgcagtcagggatggtagataacttcatcgaccgtaagcacggtcgtgaagaactctcttacccggacgttcagtggcagcatgaaagcctgaagccggtactggagccgacctacggcatcattctgtatcaggaacaggtgatgcagattgcccaggtactttccgggtatactctcggcggcgcggatatgctgcgtcgtgcgatgggtaagaaaaagccggaggagatggccaaacagcgttccgtttttgaagaaggcgcgaaaaagaacggtatcgacggcgaactggcgatgaaaatctttgacctggtggagaaattcgccggttacgggtttaacaaatcgcactccgccgcttatgcgctggtttcttaccagacgctatggctaaaggcgcactatccggcagagtttatggcggcggtgatgactgccgatatggacaacaccgagaaggtcgtcggcctggtggacgagtgctggcggatgggactgaaaattctgccgccggatattaactccgggttgtaccatttccacgttaatgatgagggcgagatcgtctacggtattggcgcgatcaaaggcgtcggcgaaggtccgatcgaagcgatcatcgacgcgcgtaatcagggcggctatttccgcgagctgtttgatctgtgcgcgcggaccgacaccaaaaagctcaaccgccgggtgctggaaaagctgatcatgtccggggcgttcgaccgcctggggccgcaccgcgccgcgctgatgaactcattgggcgatgcgctgaaagccgccgaccagcacgccaaagcggaagctatcggtcagacggatatgttcggcgtgctggcggaagagccggagcaaatcgaacaatcctatgccagctgccagccgtggccggagcaggtggtgttagatggggaacgtgaaacgttggggctgtacctgacgggccaccctatcaatcagtatttaaaagaaattgagcgctatgtcggcggggtaaggctcaaagacatgcatccgacagaacgtggtaaagtcaccacggctgcggggctcgtgattgccgcaagggttatggtcaccaagcgcggcaatcgtatcggcatctgtacgctggatgaccgttccgggcgtctggaagtgatgttatttaccgacgcgctggataaataccagcagttgctggaaaaagaccgcatacttatcgtcagcggacaggtcagctttgatgacttcagcggggggcttaaaatgaccgcccgcgaagtgatggatattgacgaagctcgcgaaaaatacgctcgcgggcttgctatctcgctgacggacaggcaaattgatgaccagcttttaaaccgactccgtcagtctctggaaccccaccgctcggggaccattccagtacatctctactatcagagggcggatgcgcgtgcgcggctgcgttttggcgcaacgtggcgtgtctctccgagcgatcgtttacttaacgatctgcgtggcctcattggttcggagcaggtggaactggagtttgactaatacaggaatactatgagtctgaatttccttgattttgaacagccgatagcagagctggaagcgaaaatcgattctctgactgcggtaagccgccaggatgagaaactggatattaatatcgatgaagaagtccatcgcctgcgcgaaaaaagcgtagaactgacgcgcaaaatcttcgccgatctcggcgcatggcaggtagcccaactggcgcgccatccgcagcgtccgtacaccctggattatgtccgtctggcgtttgatgagtttgatgagctggcgggcgatcgcgcctatgctgatgacaaagccatcgtcggcggtatcgcgcgtctggaagggcgaccggtgatgatcattggtcatcagaaaggtcgtgaaaccaaagaaaaaattcgtcgtaactttggcatgccagcgccggaaggctaccgcaaagcgctgcgcctgatggaaatggctgaacgcttcaacatgccgattatcaccttcatcgacaccccgggtgcataccctggcgtgggcgcggaagagcgtggtcagtctgaagccatcgcccgcaacctgcgtgagatgtctcgtctgaacgtaccggtcatctgcaccgtgattggcgaaggcggctccggcggcgcattggcgattggcgtgggtgataaagtgaatatgctgcaatacagcacctattccgttatctccccggaaggttgcgcctctattttgtggaagagcgccgacaaagcaccattggctgctgaagcgatgggcatcatcgcgccgcgtctgaaagagctgaagctaatcgattccatcattccggagccgctgggcggcgcgcaccgtaatccggaagcgatggcggcatcgctaaaagcgcagctgctggaagatttagccgatctcgatgtgttaagcaccgatgatttaaaaaaccgtcgttaccagcgtttgatgagctacggttacgcctaatcatttacctcatttttccccaagaggccggataatccggcctctttttttggtcgaggaaaaatgagacgccgatgagttgatgtgattaaacgcaacggcatgttctccctgacactgtatcaactgccaggcgtgtggccagggcaggcagtgaactacccttcaaggagaaaattatgggattgcaaaaaacactggcgctcagcgccgtagcggcagggatcatgttgagcttatccggtgcgcaggccgcgccgctgcttagcagtagtgagccaatgaccattaacgccagcgatctggcggcgaaagagaaagcgctaacggattttccgttaatggaggccgtgaaatcctctattcagacgttggataacagcgcggtcgaacaaatcgaaccggggcgcgccgctaacccggcaaacgtaaaacgcgttgaaagtattctgaaagaggccgactgggattatctgttcccgatgcgcgcgccggaatatacttactctaacttcctgaaagcgataggtaaattcccggcggtttgtggtacctacaccgatggacgcgatagcgacgctatctgccgtaaaaccctggctactatgtttgcgcattttgcccaggagacgggcggtcacgaaagctggcgtgacattccggaatggcgtcaggcgctggtctatctgcgcgaagtcggctggacagaagggcagaaaggcggctacaacggcgaatgtaacccggatgtatggcagggccagacctggccgtgcggtaaagataaggacggcgatttcctcagctattttggccgcggggcaaaacagctttcttataactacaactatgggcctttctctgacgcgatgtatggcgacgttcgccctctgctggataaacccgagctggtggcggatacctggatgaacctggcgagcgccgtcttcttctttgtgtatccgcagccgccgaagccgtctatgctacatgtgattgacggtacctggcagccaaacgatcgcgataaagcaaacggcctggtatcaggtttcggcgtcactattcagatcatcaatggcggcgtggagtgcggcggcgcagatgagaatgcgcagtcgcttaaccgcatcgcctactacaaagagtttgccaactacctgaaagtgccggtgccggcggacgaagtgttgggctgtaaaaagatgaagcagttcgatgaaggcggcgctggcgcgttaccgatctattgggaacaagactggggctggagcgccgatactgcggacggtaaaacctattcctgccagttagtgggatatcagacgccgtataccgcctttaaagagggcgactacacgaaatgtgtacagcattatttcaacgttaatgtcgtcgatgataacggaaccactgaaccggatgtcacgccaactccggcgccagtgacggatgaaaacgtggcgccagtcgcgcgcattgccggaccggtcggggcggtggaagccggtagcccggtttcactcagcgcggaaggatcgaccgacgcgaatggcgacaagctcacctatacctggatgtcgcaggatggcaaaacgctgagcggccaggataaagccgttgtgattttcaacgcgccggatgtcactcagaacacccagtatgtggtgaatctgaccgttagcgacggtacgctctccagtacagcggtttatacgctgaatgtgaaagcgaaggccgccgctgcggatgacgaagataagaccaccagctaccctgcctggagcagcagccagaaatggaatccgggcgacatcgtcaacagtaatggcgcattgtaccagtgcaaaccgttcccggaaggctcatggtgtaatgttgcgcctgcctactatgagcccggcgtagggattgcctgggccgatgcatggaacgcattgtaataagataaatcctgtcggtgctttgcatcggcaggattgttactatgcttatctcaggttttttcaggagaaagcatgaacatcatcgccattatggggccgcacggggtttattataaagatgaacccatcaaggagcttgagcgtgcattacaatccctgggatttcaaattatctggccgcaaaatagcgttgacttgttgaagtttattgaacataacccgcgcatctgcggcgttatttttgactgggatgaatacagtctcgacctttgtagcgaaatcaaccagctaaatgaataccttcctctctacgcctttatcaataccaactccacgctggacgttagcgttcacgatatgcgcatggcgctgtggttttttgagtatgcattggggctggctgaagatatcgcgacgcgcattcatcaatatacaaacgaatatctcgataatattacgccgccgtttaccaaagcgctttttacctacgccaaagaaggaaaatataccttttgtacgccgggtcatatggcgggaacggcgtatcagaaaagcccgccaggctgcctgttttatgacttttttggcggcaataccttaaaagctgatgtgtcgatttcggtgactgaactgggatcgctgctggatcacaccgggccgcatctggaagcggaagagtatatcgcccgtacttttggcgccgagcagagctatatggtgacgaacggtacgtcgacctcgaataaaattgtcggtatgtatgccgcgcctgcgggaagtacgctacttattgatcgtaattgtcataaatcgctggcgcatttgctgatgatgagcgatgtggtgcctctctggttgaagccgacgcgcaatgcgctcggcattctcggcggtattccccgaagggaatttacccgtgcaagcatcgaaagcaagatagaggagacccctcaggcgcaatggccggtgcatgcggttatcaccaattcgacttacgatggtctgctgtataacactaactggatcaagcaaatgctggacgttccctcgatccattttgattccgcttgggtaccctatacccatttccatccgatctaccaggggaaaagcgggatgagcggcgatcgggtgcccggaaaagtgattttcgaaacgcaatccacccataaaatgctggcggctttttcgcaggcgtcgcttattcatatcaaaggggaatatgacgaagagacgtttaacgaagcgtttatgatgcacacttccacatcgccgagctatcccattgtcgcctctatcgagaccgcagcggcgatgctgcgcggcaatccagggaaaagattgattaatcgttcggtggaacgggcgctccattttcgtaaagaggtacagcggctacgtgaagagtccgatagctggttctttgatatctggcagccggaagaggttgatgaggccgaatgctggccggtcacgccgggagaaacctggcatggcttcaccgatgccgatgacgatcatatgttcctcgatccggttaaggtgacaatcctgacgccggggatggatgaacagggcaacatgagcgaagaggggatacccgccgcgctggtggcgaagttccttgatgagcgaggcgtggtggtggaaaaaaccgggccgtataatctgctgtttttgttcagcatagggattgataagacccgtgcgatggggctgctgcgcggactgacggaatttaaacgcgcctacgatcttaacctgcgcgtcaaaaatatgttgccggatctgtatgcggaagatccggatttttatcgcaatatgcgcattcaggatctggcgcaggggatccataaactgatccgccagcacgatcttccggggctgatgctgcgggcgttcgaggttttaccggagatgatcatgaccccgcaccaggcctggcagcgtcagatcaaaggtgaggtggaaaccgtggcgctcgatcaactgccagggcgcgtttccgcgaatatgatcctgccttatccgccaggcgttccgctgttgatgcccggcgagaggatcacgcaacagagtcgggccgtgctcgattttctgctgatgctctgctcgattggccagcattatcccggttttgaaacggatattcacggcgcgaaacggaatgaagacggggtgtaccaggtacgagtcttaaaacacgcctgctagcttgcctgacgggaatgtgacgagtaacgtactgataatcaataaaggagacgctatgctgggattaaaacaggttcatcacatcgcgatcattgcgacagactatgcggtgagcaaggcgttttattgcgatattctggggttcgatctgctaagcgaagtctggcgggaagagcgtgactcgtggaagggcgatttggcgctaaacgggcagtatgtgattgagcttttctcttttcccttccctccggcgcgtccaagccgacctgaagcctgcggcctgcgccatctggctttcagcgtggaaaatgtggaaaacgccgttgcgcatctggaaaagcatcaggttaagtgcgaaccgatacgcatcgatccgtataccgggaagcgctttacttttttcaacgatccggacggtttaccgcttgagctgtatgagcagtaaggcttgtcattaagacgctcgccaggtaacgttgccgggctaagtcactataagcatggatcatgaccactctcacgttgaatacctcgttactctcttctcgccgtattctggctgcctttagcggcggcctggattctacggtgctgttgcatcaactggtgttgtggcgagaacgccatcctgacgtcacgctgcgtgctatccatattcatcacggtttaagccctcatgctgatagctgggtgcggcattgcgaaaccgtatgcgaacgctggcaggttccgctggtagtggagcgggtgacgctggcggataatggcctgggtatcgaggcccatgcgcgtgaagcgcgctaccgggcgttcgcacagacgctattgcctggcgaagtgctggcaaccgcgcagcaccttgacgatcagtgtgaaacgtttctgctggcgttaaagcgcggcagcggtccggccggactttccgcgatgggagaacgctcgccttttgccggaactctgcttcttcgcccgctgttgagagaaacgcggaagacgctggaacagtgggctgtgcgtcatggcttatgctggattgaagatgaaagcaatcaggatgacgcctacgatcgcaattttttacgcctgcgcgcgcttccgctcttacagcagcgctggccgcattttcctgcggcggtagcccgtagtgcgacgctctgcgccgagcaagaaaggctgctggacgagcttctggccagcgatcttactgactgtatcacggcggagggaacattgcggctctctccattaatgtcgatgagcgatgtacggcgggcggcgattttgcgtcgctggctggcgatgcgtaatgcgccgatgccctctcgcgacgcgctggaacgtatctggcaggaggtggcgctggcgcgcgacgatgcctctccctgtttacgctttggcgatcacgagattcgccgttaccagtcgcaactgtggtggattaaatccgtggccggacaacacgaaacgacggtcgcctggcccgtctggcaaacaccgctggcgctgcctgccggcttagggacggtacagctcgttcctggtggcgaactgcgccgaccgcgagaggaagaatccgtcagcattcgttttaaagcgccaggcgtgttacatattgtcgggcgtaacggtggacgtaaattaaagaaaatctggcaggagcaggggatcccgccctggcgacgagataccacgccgctgttgttttacggcgaaacgctgattgcggctgcgggtgtttttgtgacgcgtgagggagcagcagaagataaagaaggggtgagtctggtttggcatgcctgatggcgctgcgcttatcaggcctacgtatcgcatggaacgtaggccggataaggtgcttgcaccaccatccggcaacaaaatactcaggattcgctaactaccacggtaccaatttccgggtggctgaaactggcgattttatcgagacgaagttcacaagactcgccggaaacttcggcaagcagatattctacgtttttacgtaagatcaaatcgttcgcttttgcctgcaaaacctcgccatcttttaacgttagcgtcagtattaaatgatgcatgcaggcaagctcaagactatcgtagtcatcgcaattaatgggttgatacgtttcattcattgacataatcgctcaccagtaagttcgcggcagcataagctgccttttccctgaccgactctgaaagggcgctatctgccgccacttcattaagcactttcaatacacaacccagcgcatccgggacataccctaagtctccgctggcgatttccgcataccgcttgcgtactaactcacaatatttttccacatgccctcctgtcagcattctgacttaaccgtggatgcaagtctaagcctacgaagttaaatcttgtttagcaaggtgactataccatactcatttgcgcaatatcagcgcctgacgcgagtgggtaaaagattcgttaacagccttttagcgcggttttcgctacaatgggcgcctgattcgaaaggagttttctcatggcgcttaaagcgacaatttataaagccgtcgtcaatgtggctgaccttgatcgcaaccggtttctggatgcggcattgacgctggcgcgtcacccttctgaaacgcaggagcgcatgatgctgcgcctgttggcatggataaaatatgctgatgaacggttgcagtttacacgtgggctcagcgcggaagatgagccggaggcctggctgcgcaacgatcatctgggcatcgatctctggatagagctggggctgccggatgagcgccgtattaagaaagcctgtactcaggcgagcgatgtcgcgctctttgcttataactcccgggcggcgcaaatctggtggcagcagcatcaaagcaagtgcgcgcagttcgctaacctgtccgtctggtatctggatgacgggcagctggcgcagctcagtgaatttgccgatcgtaccatgacgctacaggcgacgattcaggacggcgcaatctggctttctgatgctcggaataatctggaaatacagctaaccgcctggcaacagccctcatgattgccatctcccggacggtctccatagccgataatgagctggaaattacggccattcgtgcgcagggcgcgggtggtcagcacgtaaataagacctctagcgcgattcatttgcgctttgacattcgggcctctggcctgccagagtattataaacagcgtttgctgacggccagccaccatctgataagcgatgatggcgtcattatcattaaggcgcaggagttccggagccaggagctcaaccgggaagcggctatcgccaggctggttgccgtcataaaagaattaaccgcggagcagaaaagccgtcgcgcaacccgtccgacgcgtgcctcgaaagagcgccgtttgtcctcaaaggcgcaaaaatcttctgtaaaggcgcttcgcggcaaagttcgtcgtccactggattgacgggcaggaatagcaatttcataaggattttatggtgagaacagcaatattgtcagtagcggcagcctgtacgctatttgcattgatagggtgtaataaccgtgcggaagttgacgccctgcaacctgcgcaggcggcggaattaaaacccatgcagcaaagctggcgcggcgtgctgccctgtgcggattgtgaaggtattgaaacgtcactatttctggaaaaagacggcacatgggtgatgaacgagcgctatcagggcgtgcgcgaagaaccttcctcttttgcgtcatacggtacctgggcgcggacggcggataaactggtgttaaccgacagcaatggcgagaaatcgtattatcgcgcgaagggcaatgcgctggagatgctcgacagagaaggcaatccggtggcttcgcagcttaattatacgctggtgcctgttaccgccagcctgccggtaacgccaatgccgctgcgtggtatgtatgtatacagggccgatgcggcgacctttaccgattgcgcgaccggaaaacggctgccggtcgccagtaacgcccagcttgagcgcggctatctggcggcgaaaggtgaagcggaaaaaccggtgctgctgacggtagaagggcattttgtgtttgccgcgaacccggacacgggcgagccggtaaaaacgctaatagccgataaaaatgcgaagtttgcgccgggtaaagattgcactcactaataaaaggcctcgcagggtgcgaggcctttacatatctgccggatggcgccgggcaaccccaacaaaatgtcgtttagcccttaatcgccttgaccagataatcaacgatatcgccggttttaatcagcgatttttcaccgctacgacggtatttatactcaatatcgtcgttatccaggttgcgatcgccaatcacgatagtatgtggaataccaatcagctccatatcggcaaacatcacgcccgggcgctctttacggtcgtccatcagcacttcaatgccctgcgcgcgcaattcgctgtacagcttttccgccagctcctgcacacggaaggatttgtgcatattcatcggcagaatagcgacctggaaaggcgcaatggcgtcaggccatacaatgccgcgctcgtcaaagttctgctcgatagcagcggcaacgacacgtgttacgccgataccgtagcagcccattgtcaggatctggttacggccatcttcaccctgaacggaggctttcagcgcttctgagtacttggtacctaactggaagatgtgacccacttcgataccgcgtttgataagcaacgttccctgaccatccggactcggatcgccggcgactacgttacggatgtcggcaacaacaggcgtcgccacatcgcgatcccagttaataccaaagtagtgtttaccgtcgatgttggcgccagcggcaaaatcgctcatggcggcaacggtacgatcgatgatgaccggaatcggcatattgaccgggccgagggagccagggccggcattaattacggcgcgaatctcttcttcggtagcgaaggtcagcgggctggcaacgtgcggcagtttttccgctttaacttcattcagttcatgatcgccgcgaaccagcagagccaccagcggagacttgctgtctttcaccgctttcaccagcagcgtttttaccgttttttcaattggcaggttgaattgttccaccagctccgcgatggttttggcatttggcgtatcgaccagagtcatttcctgcgtcgccgctgcgcgcggcgtttgcggcgcgatagcttctgccagttcaatgttagccgcgtaatcagaaacatcagagaaaacgatatcgtcttcgccgctttgcgccagcacctggaattcatgcgaggcgttgccgccgatagaaccggtatcggcctgtaccgcgcggaaatccagccccatacggctgaagatacggctatacgcggcgtacatggcgtcataggtttcctgcaacgactcctgagaggtgtggaaagagtaagcatctttcatcaggaattcgcgcgaacgcatcacgccaaagcgcggacgcacttcatcacggaatttggtctggatttggaagaagttcagcggcaactgcttataagagctgagttcattacgcaccaggtcggtgataacttcttcgtgggtcgggccgagtacgaacggacgctcgccacggtcgacaaaacgcagcagttccggaccgtactgttcccaacgaccactctcttgccacaggtcggctggctgaacgactggcatcgacacctcgatagcaccggcgttgttcatctcttcacgcacgatgttttcgacttttttcaggacgcgcaggccggtcggcagccaggtatataacccggaggcgagcttgcggatcatcccggcgcgcagcatcagctggtggctgataacctcggcgtcggcaggtgtctccttcagagtggagagcaggtattggctagtacgcatgttgttacggttccagttgaacgatcgaacaggctcaatgtgagcctgatacaaaaaaagtgatttagtttaccagcgtgcaagagatgtcaaaagagaagggcgtgaaattaccgtggttccagcgcaaacacttcaaatcccgagttaaccacacgccagcgcacgttaaaatcatgcagccagacggcataggttttgcccgtctcttcacccttacgataagccgggcgaggatcttgcgccagcacatcgcaaataaatgtccgtagctgcggataacgcctttccagcgtcgtaagctgttgagccacctcagcggtaaaactcacgggcatttcagctatcggcgcctgttgcgcatagctggcggcggcgtccggtaaggcctcggcaaacggtaaatacggtttaatatccaccaccggcgtgccatccaccagatccagactgcctaatttcagaattacgctctctttccggcactcgataccttttagcgcaacgagcgacatgccaatcggattggggcggaacgtggagcgcgtggcaaaaacgcccattctggcgttaccgccaagacggggcggacgaactgtcggccgccagccgccgtccatcgtctgatgaaaaacgaaaagcacccacaaatggctgaacgcttccaggccgcgaacggcatcggcctggttgtaaggcgctatcagatgcagttcgccgcaggcgcttttgaccagaccaggctggcgcggaacggcgaatttttctttatagggggagcgaataacgccgatttgttcaaactgaaagctgctcatttcgccgaaatattcagggcggacccgatacaaaccgcctgacgatagcagcctggcgtgccgctggtaatttcacagctgtgcagcaggacggcgttggctttcattttagatgcattaatctgcatacgcttgcgcgcagttggaatgttaggcggagagtcttgatttgtcgcctggcaggattcgccgctaacctcgccaagatctcggaaaggtttgccgactaagtcttcagcattggtgtaaatcctgacgggagcggcacgcggcgctttaggtttctccggctccgcttttggcggggttgcggtgctttgaacgggttcaacaggggatctgcttagcatggaacaaccgcccagcatgagtgccaataaacagatcggtaaagcacgcataatatttcctcaatgaatgttctaattgccagatattgaatcaggagcttgcataaatgacaagacgggcaatagcccgtcctgaataatattacagattgtggaatcagcctaaaacttaccagcctttcaccgcgccgccattaaaaactttatttgcggcttcgtacacttcatcagactgataagcctgaacgaattttttcacattctcggcgtctttgttatcttcacgcgtcacgatcaggttaacgtacggagaatctttatcttcaacaaagataccgtctttcgctggcgtcaggccaatctggctggcgtatgtcgtattgatgaccgctagcgcgatctgcgcgtcatccagcgaacgcggcaactgcggcgcttccagctcaacaattttcagatttttcgggttttccacgatatccagcgaggtaggaagcagaccgacgccgtctttcagtttaatcagccctactttttgcagcagcagcagggaacgaccaaggttggtcgggtcgttaggcacagcgacctgggaaccgtccttgagctcatccagggatttgatttttttggaatatcctgcaatgggatagacaaaagtcttaccaacggaaaccagtttgtaaccgcgatctttgatttgctgatccagatacggtttgtgctggaaggcattggcatcgatatcgcctttgctcagcgcttcattaggcagaacataatcattaaaggtcaccaattccacgtccaggccgtatttttctttcgcgactttctgcgcgacttcggcaacttgctgctctgcgccaacgattacgccgactttaatatgatttggatctttttcatcctgaccgcaacccgcaagtgccagagaaccaatcagagcacccactgccgcaaaggttttgaatttgaacgccatgcttatttccttaatgagtatttgtgttgtgtttaacgttacttatgcgtgacagccctgacgatgcgatcgccggataactgaattaaataaaccagaacgacaagtaataccagcaccgtattcatcacggtagcattgtatccaatataaccgtactgatagccgatttgaccgagaccgcctgcgccgacggcgccgcccattgcggagtaaccgaccagggtgatcagtgtaatggttgccgcattcaccagaccaggcagcgcttccggtaaaaggattttacgtacaatttgcagcggcgtggcgcccatcgctcgtgaggcttcaatcagcccggcagggatctctaacaacgcattttccaccatacgggcgataaaaggcgcggcgccgacggtcagcggtacaattgcagcctgcaaaccaatggaggtgccgacaattattcgggtaaaaggaatcatccacaccagcaggatgataaagggagtcgagcggaaaatattgaccaccgcagagagggagcgatacagcctggcgttctccataatctgccccgggcgcgtaacatacagcaatacgccaaccggcaggccaatcacgaaaccgaagaaaccggagacaaaggtcatcgccagcgtttcccagacgccacgaaccagtaaccacatcattgcctcagacataacccagtacctctactttcacatggtgatcctgcagccaggcaattgcggcttgcgtctcttcttgcgtgccgtgcatttccgttagcataatgccgaacttcacaccgccggcgtaatccatctgcgcgctgataatattattgttcacgttgaaacgacgcgcggtttcagaaagcagcggggcatccacagactgcccggtgaattccatgcgcagcatcggcacgctgtcagtttccggcgacgctttcaaacgcgcctggtaatcttccggaatgtccagatgcagagtggactgaataaacttctgcgccagcggcgttttaggatgcgagaagacttcgctgaccgtatcctgctcaataagctcgccattactgataacggcaacgcagtcgcagatacgtttcacgacatccatttcatgagtgataagcagaatcgtcaaccccagacgacggttgatatctttcagcaattccaaaatcgaacgggtcgttgcgggatcaagcgcgctggtggcttcatcgcacagcaacacttttggattactggctaacgcgcgggcaatcgcgacacgctgtttctgaccgccggaaagatttgccggatagctgtcgtgcttgtcgccaagaccgactaaatccagcagctctgtgacacggcgtttgatctcttcctttggtgtgttatccagttccagcggcaacgcgacgttgccaaacacggtacgggaagagagcaggttaaaatgttggaaaatcatgccgatttgacggcgagctttggtcaactcagactctgaaagcgttgttagctcctgaccgccgacctgaacgctaccttcggttgggcgttcaagtaagttaacgcagcggataagcgtacttttaccggcgccggaggcgccaatgacgccataaatctgcccggcaggaacgtgcaggctgacattatttagcgcctgaatggtgcgcgtcccctgctggaacactttggtaatattcgaaagtttaatcattgattctttattatcgtaatgaaatgagcggaggcattttcgtctgcctaatacggtcaacgccgtcaacagaatggatgttaaggcatccagacgtctaaatcaatcaggctttatacgatgagcactttcttgcctgctgaaacatgcgatactagcgccacttgctttactcaggagctataaaaggtggcaaagtttgtacccgcaatttttctcgaccgtgacggcaccattaatgtggatcacggctacgtacatgaaatcgatgcatttgagtttatagacggcgttattgacgctatgcgcgagctaaaaaaaatgggctatgcgttggtggtggtgacgaaccagtccggaatcgcgcgcggcaaattcactgaggcgcagtttgaaacgttaaccgaatggatggactggtcgttggcggatcgcgatgttgatttggacggcatctattattgtcctcaccatccgcagggcagtatagaagagttccgtcaggtatgtgattgccgcaagccgcatccaggaatgcttatctcggcgcgtgatttcctgcatatcgatatggcggcttcttatatggtgggagacaagctggaagatatgcaggcggcagcggcggcaaatgtcgggacaaaagtgctggtgcgtacgggcaaaccggtcacggcagaagcagaaaacgcggcggactgggtgttaaacagccttgctgacctgccatcagcgataaaaaagcagcaaaaataagcgttatggataaaagatgagcggttaaaacaaaaatgcatttttccgcttgtcttcctgaaccgactccctataatgcgcctccatcgacacggcggatgtgaatcacttcacacaaacagccggtcggttgaagagaaaaatcctgaaattcagggttgactctgaaagaggaaagcgtaatatacgccacctcgcaacggtgagcgaaagccgcgttgcactgctctttaacaatttatcagacaatctgtgtgggcactcgaagatacggattcttaacgtcctcggacgaaaaatgaataccaagtctcaagagtgaacacgtaattcattacgaagtttaattcattgagcatcaaacttttaaattgaagagtttgatcatggctcagattgaacgctggcggcaggcctaacacatgcaagtcgaacggtaacaggaagcagcttgctgcttcgctgacgagtggcggacgggtgagtaatgtctgggaaactgcctgatggagggggataactactggaaacggtggctaataccgcataacgtcgcaagaccaaagagggggaccttcgggcctcttgccatcagatgtgcccagatgggattagctagttggtgaggtaacggctcaccaaggcgacgatccctagctggtctgagaggatgaccagccacactggaactgagacacggtccagactcctacgggaggcagcagtggggaatattgcacaatgggcgcaagcctgatgcagccatgccgcgtgtatgaagaaggccttcgggttgtaaagtactttcagcggggaggaaggtgttgtggttaataaccgcagcaattgacgttacccgcagaagaagcaccggctaactccgtgccagcagccgcggtaatacggagggtgcaagcgttaatcggaattactgggcgtaaagcgcacgcaggcggtctgtcaagtcggatgtgaaatccccgggctcaacctgggaactgcattcgaaactggcaggcttgagtcttgtagaggggggtagaattccaggtgtagcggtgaaatgcgtagagatctggaggaataccggtggcgaaggcggccccctggacaaagactgacgctcaggtgcgaaagcgtggggagcaaacaggattagataccctggtagtccacgccgtaaacgatgtctacttggaggttgtgcccttgaggcgtggcttccggagctaacgcgttaagtagaccgcctggggagtacggccgcaaggttaaaactcaaatgaattgacgggggcccgcacaagcggtggagcatgtggtttaattcgatgcaacgcgaagaaccttacctggtcttgacatccacagaactttccagagatggattggtgccttcgggaactgtgagacaggtgctgcatggctgtcgtcagctcgtgttgtgaaatgttgggttaagtcccgcaacgagcgcaacccttatcctttgttgccagcggttaggccgggaactcaaaggagactgccagtgataaactggaggaaggtggggatgacgtcaagtcatcatggcccttacgaccagggctacacacgtgctacaatggcgcatacaaagagaagcgacctcgcgagagcaagcggacctcataaagtgcgtcgtagtccggattggagtctgcaactcgactccatgaagtcggaatcgctagtaatcgtggatcagaatgccacggtgaatacgttcccgggccttgtacacaccgcccgtcacaccatgggagtgggttgcaaaagaagtaggtagcttaaccttcgggagggcgcttaccactttgtgattcatgactggggtgaagtcgtaacaaggtaaccgtaggggaacctgcggttggatcacctccttaccttaaagaagcgtactttgcagtgctcacacagattgtctgatgaaaaacgagcagtaaaacctctacaggcttgtagctcaggtggttagagcgcacccctgataagggtgaggtcggtggttcaagtccactcaggcctaccagattcgctcccgtgctttgttgtggcaaagctcgcatacttcagtatgcttcgcttcaccacgccgcgcccggaaacgaatcaaaggtaagaggttctgactacacgatggggctatagctcagctgggagagcgcctgctttgcacgcaggaggtctgcggttcgatcccgcatagctccaccatctcgtgagtgtttacgaaaaaatacttcagagtgtacctgaaagggttcactgcgaagttttgctctttaaaaatctggatcaagctgaaaattgaaacacagaacaacgaaagttgttcgtgagtctctcaaattttcgcaacacgatgatgaatcgtaagaaacatcttcgggttgtgaggttaagcgactaagcgtacacggtggatgccctggcagtcagaggcgatgaagggcgtgctaatctgcgataagcgccggtaaggtgatatgaaccgttataaccggcgatacccgaatggggaaacccagtgtgattcgtcacactatcattaactgaatccataggttaatgaggcgaaccgggggaactgaaacatctaagtaccccgaggaaaagaaatcaaccgagattcccccagtagcggcgagcgaacggggaggagcccagagcctgaatcagcatgtgtgttagtggaagcgtctggaaaggcgcgcgatacagggtgacagccccgtacacaaaagcgcatgtgctgtgagctcgatgagtagggcgggacacgtggtatcctgtctgaatatggggggaccatcctccaaggctaaatactcctgactgaccgatagtgaaccagtaccgtgagggaaaggcgaaaagaaccccggcgaggggagtgaaaaagaacctgaaaccgtgtacgtacaagcagtgggagccccaccactaagccagtggtgaactccacatccgcatcctttgctgaggatacggttaacggagcgaaagcgacgttcaaccgcaaaacaagcagagggggcttagtggtggggtgactgcgtaccttttgtataatgggtcagcgacttatattctgtagcaaggttaaccgaataggggagccggagggaaaccgagtcttaattgggcgttaagttgcagggtatagacccgaaacccggtgatctagccatgggcaggttgaaggttgggtaacactaactggaggaccgaaccgactaatgttgaaaaattagcggatgacctgtggctgggggtgaaaggccaatcaaaccgggagatagctggttctccccgaaagctatttaggtagcgcctcgtgaattcatctccgggggtagagcactgtttcggctagggggccatcccggcttaccaacccgatgcaaactgcgaataccggagaatgttatcacgggagacacacggcgggtgctaacgtccgtcgtgaagagggaaacaacccagaccgccagctaaggtcccaaagtcatggttaagtgggaaacgatgtgggaaggcccagacagccaggatgttggcttagaagcagccatcatttaaagaaagcgtaatagctcactggtcgagtcggcctgcgcggaagatgtaacggggctaaaccatgcaccgaagctgcggcagcgaacgtatcacccaagacaactttacggagttgacgattgacggagcgaagcgacgtcaaagcgttcattaaagtcgagttggcttagggatacgttcgttgggtaggggagcgttctgtaagcctgtgaaggtgtgtcgtgaggcatgctggaggtatcagaagtgcgaatgctgacataagtaacgataaagcgggtgaaaagcccgctcgccggaagaccaagggttcctgtccaacgttaatcggggcagggtgagtcgacccctaaggcgaggccgaaaggcgtagtcgatgggaaacgggttaatattcccgtacttggtgttactgcgaaggggggacggagaaggctatgttggccgggcgacggttgtcccggtttaagcgtgtaggtgtgtgttccaggtaaatccggttcactttaacactgaggcgtgacgacgaggcactacggtgctgaagcaacaaatgccctgcttccaggaaaagcctctaagcatcaggtaacatcaaatcgtaccccaaaccgacacaggtggtcaggtagagaataccaaggcgcttgagagaactcgggtgaaggaactaggcaaaatggtgccgtaacttcgggagaaggcacgctgacacgtaggtgaagtgatttactcatggagctgaagtcagtcgaagataccagctggctgcaactgtttattaaaaacacagcactgtgcaaacacgaaagtggacgtatacggtgtgacgcctgcccggtgccggaaggttaattgatggggtcagcgcaagcgaagctcctgatcgaagccccggtaaacggcggccgtaactataacggtcctaaggtagcgaaattccttgtcgggtaagttccgacctgcacgaatggcgtaatgatggccaggctgtctccacccgagactcagtgaaattgaactcgctgtgaagatgcagtgtacccgcggcaagacggaaagaccccgtgaacctttactatagcttgacactgaacattgagccttgatgtgtaggataggtgggaggctttgaagtgtggacgccagtctgcatggagccgaccttgaaataccaccctttaatgtttgatgttctaacgtggacccgttacccgggttgcggacagtgtctggtgggtagtttgactggggcggtctcctcctaaagagtaacggaggagcacgaaggttggctaatcctggtcggacatcaggaggttagtgcaatggcataagccagcttgactgcgagcgtgacggcgcgagcaggtgcgaaagcaggtcatagtgatccggtggttctgaatggaagggccatcgctcaacggataaaaggtactccggggataacaggctgataccgcccaagagttcatatcgacggcggtgtttggcacctcgatgtcggctcatcacatcctggggctgaagtaggtcccaagggtatggctgttcgccatttaaagtggtacgcgagctgggtttagaacgtcgtgagacagttcggtccctatctgccgtgggcgctggagaactgaggggggctgctcctagtacgagaggaccggagtggacgcatcactggtgttcgggttgtcatgccaatggcactgcccggtagctaaatgcggaagagataagtgctgaaagcatctaagcacgaaacttgccccgagatgagttctccctgagacttagagtctcctgaaggaacgttgaagacgacgacgttgataggccgggtgtgtaagcgcagcgatgcgttgagctaaccggtactaatgaaccgtgaggcttaaccttacaacgccgaagatgttttggcggattgagaagacaacaattttcagctcagattcagagtccgaaggattttacgctgagacaaggcggcaaacgcagcgacggaaggagcatacagaagtatgtgactgacgctcgcaagagcagccaacgccgtatcagtgtaaaagacacaggacggagcacaaagaatttgcctggcggcactagcgcggtggtcccacctgaccccatgccgaactcagaagtgaaacgccgtagcgccgatggtagtgtggggtctccccatgcgagagtagggaactgccaggcatcaaattagaagtatggcattaactttcggggcagttcactactcgacagagagtaggacaaaagcgaaagcttttgaacgttgcgaagcaacggcccgaagggtgaatcacgaagtgattcataaactgccaggcatcaaattaagcagtaaactgatgtaaaaatcagtggttgtaaaagaattcggtggagcggtagttcagttggttagaatacctgcctgtcacgcagggggtcgcgggttcgagtcccgtccgttccgccacttattaagagccctgagcattagctcagggctttttctttccatgtcatttaattattgctcaattcgcaaaaatcctctgcatttctcgctctttttctgcaaagcgctgaaggtcataatcccctcagttaacgaacatagtgattaaaaagaggaattctatgactatccctgcattcggtttaggtacttttcgcctgaaagacgacgtggttatcgcttctgttaaaacggcgcttgaactgggctaccgtgctgtcgacactgcgcaaatctatgataatgaagcggctgttggacaggcgattgctgagagcggcgtaccgcgtaatgagctgtacatcaccaccaagatctggattgaaaaccttagcaaagacaagctaatcccaagcctgaaagagagtctgaaaaaactgcgtaccgattatgtcgatctgacgctgatccactggccatctccgggtgatgccgtgtctgtcgaagaatttatgcaggcattgcttgaagctaaaaaacaagggctgactcgcgaaattggcatttcaaacttcaccattccgttgatggaaaaggctattgccgcggtgggcgcagacaatatcgccaccaaccagattgagctatctccgtatctgcagaatcgtaaggtggttgactgggcgaaagcgcacggtatccacatcacctcttatatgacgctggcatacggtaaggcgctgaaagatgaagtgattgcgcgcattgcggctaaacataatgcgaccccggcgcaggttattctggcatgggcaatgggtgaaggttactccgtgatcccttcatccaccaggcgtgaaaatctggcaagcaacctgctggcgcaggatctgcatctggatgccgaagataaaaatgcgatcgcggcactggactgcaacgatcgtctggttagcccggaaggactggctcctgcctgggattaattacccgatcctttgtacctttacccctctttcacagctcctgcgggagctgttcttatatattcgctcaaaaagtcgataaatgcccgaatacgtgtgctgacggcgcgatcgctgtagtaaacggcgctgaaaggcatttctaccggcagacgtttatcggccagcagttccaccagttctccccgcgcgatctctttatcaatcatataatctgaaagacatgcaatgccgttaccgttcaggcaaagttgttttaacgtttccccgctattggaagaaatcccacatttgatctcatggagctgcccgtcgctacaggcaatcggccaggtattgagcgaaacaggttctgagaaccccagacacagatgccgtttcaactcttcaacggtctcaggcttgccaaagcgggcaatataatccggcgaggcgataatcttgcgatagctggtaaataacgggcgcgcgcgcagacttgaatctgtcaacgtgcctgcgcgtatcgcaacatccacttttcgttcaataagattgatgaacgtttctgaggagacaagagacaacgttatttccggataccgttcacgaaaaggtttaatcagcggcatcaggaaatgcagcattaccggcgttgccgcatcgatacgcagtaagccgcgcggggtattacgcgactccatgatttccgtttctgcggcggccatttcttgcagtatctgctgcacgcgcctgaagtatcgctctccttcttcagtcaggctcagctgtcgggtcgtacgattaagcagactgacgccgagcttcatctccagctttttaactgcccggctgacagcggaattggcctgtccaagctgctctgccgcccggctgaagctgccgctttccacgacagcgacaaaaattgcgagttcttcggaggtggctttcatttttgctcctgaagcaaaattaaattgatattttggctatttttgtcattaaaacatccaggcatactgcgtgtcatctgattactgctgttatggagttatgtatgcctctcgctttatttgcactgacaataagtgctttcgctatcggtacgactgagtttgtgattgtcggcctggtgccgaccattgctcaacaactggctatctcgttaccttccgccggaatgctggtttcaatctatgcgctgggtgtggctattggcgcgccggtgctaaccgcgctgaccggacgcctgccgcgtaaacagttactggtcgcgctgatggtcttgtttacggcggggaatttgctggcatggcaggcaccgggctatatgacattaatcgtcgcccgtctgctgacgggcctggcgcacggcgtgttcttctcgattggatctaccatcgcgacaagtctggtgccaaaagagaaagcggcttctgcgatcgctattatgtttggtggtttaacggtagcgctggtcacgggcgtgccgctgggaacatttatcggtcagcattttggctggcgtgagaccttccttgcggtatcactgttaggcgtgattgcgctgatgagcagtcaattgctgattccggccaatattcccggtcgggcggccgccagcattcgtgaccaggtgaaagtactgactcatcctcgtctgttgctgatttacgccgttacggcgctgggctacggcggggtattcacggcattcaccttcctggcgccaatgatgcaggatctggcgggattctccccggcagcggtaagctggatcttactggggtatggcgtatcagtggctatcggcaatatctggggcggtaaactggctgataagcatggtgccgtgccggcgctgaaattcattttcgccgcgctgtttgttctgcttatggtcttccaggtgacggcctccacgcagtatgctgcgctggctaccatcctagtgatgggggtctttgccttcggtaacgtaccggggttgcaggtctacgtggtacagaaagcggaacaattcacgcctaatgcggtagatgtggcgtcaggtctgaacattgcggcgtttaacattggtattgcgctgggctccgtgattggcgggcaaacggtggagcattacggtttggcgcagacgccgtggattggcgccctcattgttctggtggctttcctgctgatgggtgtcagcggacgtcttgataaacctgtacgcattgctctggagtaaattattgatgtaagcgcctacttacaaaacaaactgcaattgttcgttgaaagtgagtgctaaaatccctataacagaagaaccagtccggttgaggactggttgacgttacagaggtttgaaagtcaaaagtgcgaaaaaacacctatgcgatgcgctatgttgccggacagcccgccgagcggattttgccgccagggtcgtttgcgagcattggccaggcattgcccgccggggaaccgctaagcaatgaagagcggatccgtatcctcgtgtggaatatattcaagcagcagcgagccgaatggttatcggtgctgaagaactacggcaaagatgcgcatctggtcctgttgcaggaggcacagacgacgcctgaactggtacagtttgccaccgctaactatcttgccgccgaccaggttcccgcttttgtactacctcagcatccgtctggcgtcatgacgctttctgccgcccatcctgtttactgctgccctttacgggaaagagaaccgattttacgtttggcgaaatcagccctggtgacggtatatcccttgccggatacccgtttattaatggtagtaaatgttcatgcggtaaattttagtctgggcgtggacgtatacagtaagcagttacttccgatcggcgaccagattgcgcaccatagcggccctgtcattatggcgggtgattttaatgcctggagccgcccacgtatgaatgcgttgtaccgctttgcacgtgagatgtcgctgcgccaggtgcgtttcactgacgatcagcgccgtcgtgcgtttggacgaccgctggattttgttttttatcgtgggttaaacgtgaatgaagcctccgtactggtgacgcgcgcttccgatcacaatccgctactcgttgaattcagtcccggcaaacctgagcaataaaggtgagtcaggtctgccgtggggcaggcctctgcgggtgctgccctctatttttctcataacagaagggcactaccatgacaacgcattcccaccatgacaatgttgaaaagcagtttggttcacaggcgaacgcctatttacatagcgccgttcacgcagcgggtcgtgacttagcgcggctggcgcaaaggttgtctgatttttcccacgcgagcgtactggatatgggatgtggggctggacacgcgagttttgtcgctgcgcaacatgccaactcggtcgtggcatacgatttatccgccagcatgcttgaggttgtcgctggagcggcggaagaaagacatttaagtaatattactctccggcaaggctatgccgaaaaactgccctttgaagatgcatcgtttgaggtggtgattagccgctattccgcgcatcactggcacgacgttggtcaggcattgcgtgaggttaatcgtgtattaaagcccggtggcgtgctgattatcatggatgtcatgtcgcctggacatcctgtacgcgatatctggctgcaaacggtggaggcgttacgcgacacgtcgcatgtccgtaactattccagtggcgaatggctggcgatggtcaataacgcgatgctggtaacgaataccgtgataacagatcgtttatcgctggagtttcgctcatgggtaacgcggatgcgtacgccagcgccgttggttgaggcgattcgattatatcaggcgagcgccccggtagaggtgaagcgttattttgagttgcaggatgacggttcgtttagcagcgatactatcatgctggaagcgcataaagcggtatagcaatttaaaaggcgccgggggaagcggcgccttttggctttttcgtcggacaatatcaggagtctggcgtgctattgtccttcacaaacaacgtaagctgatcgcccggttgtagattatccgtatcatggttccagcgcatcacatctttgatattcaccccgtgacgtctggcgatactggaaagcgaatcgcctttacggacacgataggtaatgctatcgctattgtttgccagtcgttgcgcgctgctgccagcgcccacggtcaggctttgcccgattttcaggcgtgaaccacgcaggttgttccactgctgcaagtccttcgtgcttacgccaagccgcgaagcaataccggaaagcgtatcgccagagcgcaccttatagctacggctattcaacggcgtattgtcggcgatcagttgggactgaacggcgtcaatctcaccggaagccagcgactcacgcaactgctcggcatgctttttgggcaccataacatattgcggaccgcttacgcctaaggtagacccttttacaccggcattaaacgtcttcagcttgctgatagacatgcccgccatatccgcaacctgcgccatttcaactggactgtttaaacgaactcgtgccagcgctcggctttcatctgttgttggcagacgtacgccgtagcgtttgctgtttttgagaatttcactcaatgccagcatcttaggtacgtagagttttgtttctctgggcaaagaaagcgaccagaaatccgtcggttttccacgcgctttgtttgctttaattgcccgcataacacggccttcgccgctgttatacgctgcaacggttaacagccagtcgccgtcaaacattttgttcagacgctgcatcatgtctaacgcggcggtcgtagaggctacaacatcgcgacgcgcgtcataattacgggtctgctttaaaccataattgcgccctgtgctcggtatgatctgccagatgcctgcggcattggcgccagacgttgcgtgaggatcaaaagcgctctccactatgggtagtagtaccagctccataggcatgttacgtttcttaacctgccccgctatccagtacatatacggctctgcccgtaaagttacatcgtggagatagctcttattgcgtaaatacttctgtttctgttcgcgaatccggctgttttccggaattcccatctttagctcgtcgccaatgaaagcccacaagtcctgatctggcgcgatagacgttccgtcgtccatccatcgtgcctgactcgtaaactttcctgcttccccttgaccagctgcagaaaggctctgtgcgtgctgttggacgttgccagtgttctgagacgtctggcaccccacaagcaggacagaggcgagtaatatcgcttttgccttcatgtgtgtgtcaatagttgcttaaaagacgaccgatcataacggcgaagttagcgaatgacaagtaagaattatcagaacgtgtctttctttgaccttaaccatgcaaaacgcgcttctggttgttgcaatattgtttctttgtttatttcgttaattaaatcaatatcttcagttcttaaaaaaagattaatcttacgctcatttttaagaataacgggtaatgtcatttgtttttttacacgtaactctttaactttacgataatattcatttatgaacgaatcgtgcggaagtatgctcaatgcgaacttaatgttagctaaagtgtattcgtgagcgcagcaaatgagcgtgtcgtcaggcagagagttaattttcataagtgactgatacatctgtgatggcgtgccttcaaacagtcgaccacagccgccggaaaacagcgtgtcgccgcagaataagtaagggcggctaaagtaacagacgtgtcctaacgtgtggcccggcgtggcaaaaagagtaaatttctcgcctaaaacgcgaatagtatcgccatcgccaacaagatgggttgctcccttgtcttgcgtttccgccggtccataaaccgtcatttgcgggaagtgttgcaacagctctttgactccgccaacatggtcgtgatggtgatgcgtcaaaaaaatcgcctccggcatccacttatgttcagcaatggcctttaagacgggggccgcttcgccgggatcaacaatcacacagcggccttcatcattggtcagcacccagatgtaattgtcctgaaacgcgggaatactgttaagattcatatattacctctcaaataattagcggaaggttgcgatgaaaccggcaaggctctctcaaactgtcgttgcgcccggatgttggggtgagttgccctggggcaattactaccgtgaggcgctggaacagcagctaaatccgtggtttgcaaaaatgtatggtttccatttgcttaaaatcggtaatttaagcgcagaaatcaattccgaagcgtgcgcggtctcccatcaggtgaatgtttcatcgcaggggtcgccgatgcaggttctggccgatccgctacatcttccttttgcagataaatccgtcgatgtttgtctgctggcgcatactttgccgtggtgtaccgacccgcaccgtttattgcgggaagccgaccgcgtattgattgatgacggttggctggtcattagtggatttaacccgctgagtttgatggggttacgtaaactggtacccgttttacgtaaaacaccgccctataatagtcggatgtttacccttatgcggcaactggactggctgtctttactcaatttcgaagtgctacattatagccgttttcatgtcttaccctggaaaaagcagggggggcggcttttaaatacgcatatcccggcgctgggctgtttacagcttattgtggcccgtaagcggaccatcccgcttacgcttaatccgctgcgacataataaaagtaaaacccctatccgccagaccgttggcgccacccggcaatatcgcaaaccggatggctaagcttccgcctggtagccactatcttcctgcgtgggattcattgccgcggcgcgcgccagttcatcacaacgctcgttttcgggatggcctgcatggcctttgacccatacccatttgatctgatgctgacctaacgcagcatcgagacgtttccagagatcgacattttttacgggtttcttttccgctgttttccagccgcgtttcttccagttatgaatccattgggtaattccttgccgcacatattggctgtcggtgctcaatgttacttcgcaatgttcttttaacgcttcaagcgcgacgatcgccgccatcagttccatacggttattggtggtcagcgtgtaaccttcactaaacgttttttcatgaccgcgatagcgtaagatagcgccataaccaccaggccctggattccccaggcaagagccatcggtgaaaatttctacctgtttaagcatctctggtagacttcctgtaattgaaatcgataacaaaacgcaagtctgacataaatgaccgatatgagcactgcaattacacgacagattgtcctcgataccgaaaccaccggtatgaatcagataggcgcgcactatgaaggtcacaagattattgagatcggtgcggttgaggtgataaaccgtcgtctgaccggcaacaattttcatgtttacctgaagcccgatcgccttgtcgatccagaggcttttggcgtacacggtattgccgatgagtttctgctggataagccggtttttgctgatgtggtcgatgagtttcttgattatatccgcggcgcggagctggtcatccataacgcatcgttcgatatcggctttatggattatgagtttggtctgcttaaacgcgatattcctaaaaccaatactttctgcaaagttaccgacagcctggcgttggcgcggaaaatgttccccggcaagcgtaacagccttgatgcactgtgttcgcgttatgagatagataatagcaaacgtactttgcacggcgcattgctcgatgcccagatccttgctgaagtgtatctggcgatgacgggcggacaaacgtccatgacgtttgcgatggaaggagagacgcaacggcagcaaggtgaggcgaccattcagcgaatcgttcgccaggccagccggttacgggtcgtttttgcctctgaggaagagctggctgcgcatgaatcgaggcttgatctggtgcagaaaaagggcggaagttgcctttggcgggcgtaatttattcctttttaggctataaaaatcatccttcgggcgatttttgcagcaactgattcaaaaggtgagaaaaagcgttgacgggcgacaccgcaaaccgtaatattcgcctcgttcccagcgggaacatcacggagcggtagttcagttggttagaatacctgcctgtcacgcagggggtcgcgggttcgagtcccgtccgttccgccagatacaaatctcagggtgtttttatacatcctgtgaagtaaaaaaaaccgtatcactgtaaaagggatacggttttttttcgtcttcaagaagttccaccgtctatcgtggaatctggcgcaaatgggcctacgcctggatgacgaacaggatattaccgccacttctttcactgtcatggctattttgatcccactgacatttaaggcgcggcctcatggcggtgcttaaccgggatcgggacatgttcagcgcagaagcagactgcgtaatgttgatatcactcagataattacggagaaccgccagacatgcgcatcatcactccagggcatcccacttctccagcaactccaccgggatctcattgatcacctccgagaaccgttttcccaccagtctttcagcctggcgtaacagtgggatggtcgggctactgggttcactgctctcaaaccagcgacgaatgcaccgcaggcgttccagcgcatcattacgatcgcgaattggccccggttcagcattgtgtgggagggatataccgggtggcgcgttgacaggcggcacatcctctgcccgtgccggaacggcattatccataaccgtgcctgcggggtctggcactggcgctggcgacggagggatttccggtgtggttgtctgtaccacgtcaggcagcagcgctaacaactgccgcaggcgtgaaaaatctggagccagatcgcctaatgtctcacgcgcccacacttgcaggcgttctgcgctttcctgcgcttcgcgaaacgccgccagcggtaatgccccacgggcttcgaggtcggccagttgctggcggacggattcgggggccagcgcatcagccgggcggggagcggataacgcgcgctccacatcccgtacctgtaggcgcagggcggcactgtttgacagcgtaataccgcgaatgtccgccatcacgccttcgtgatccagcagcgccgccagggcattactgcgcgccagcgacgcatcttcaatagattctgcggatgcgccttcgccggtaagcagctgtggatggagtgcatcagaccagattacgctcagttctgccagttgtgtgagcatttccgccagtccctgtgcgccagcctgctggatgcgactgcgcagcagcaggatcaacacccggatatccttactgcgcgtgagcagacggcgcgcatcacgttcaatttccggccagttcacggcttccggcgtactgacaaaatcaccatattgcgcctccgcctggggggcggcgcggctgaacagcagcaggtattccggatcgtactccggatcggggccgcagggttgttccgcgcttaccggtttagtcagggacatgtccatatcattactctcagtgggttaagccgtgttcaggttcaaaaatcatgccggtcaccggacggtcatgcatggctttacctgcccaggccgtccagccaagccgctgcgcgccgccgatcaccgcaggcggtgcggcatgaggcttcaactgcagctcaatttcccagcaatattcaaaaccgatgaacgtacgcaccagttctgtcagcacgggcagattgttgccgccgggcagaaaacgcaggtaatcctccagcgtgagcgggccgataattagccggaatttgtactgcatatccggtacggcctggccgataagcgccccgttgcccagcaccgaagactgcgcgggcgtgcccagacgggtgatttcatcgttcgccaccgttatccagtgcagggcgaattctttcaccgcaaaaggtacgctgaaatagtgcgccagcgtggcggccagcccgtcaggattgcgcgattcgcgtaccagatgggcggaggctgccaggcgaacatgatctgacagcgggctttcggcgctttcccgtagatcctgcccgctgagactggcgatataaaacgcaaaacggtcgtgttccggtttgtccagcccgccaccagcggactgggcgctgcgccatgcctgccagaactgcgtcagccagcggtggtgaaaaatattggaaaaatgaaccagcgtcggatcgtgacgactctctgagcggttcagtgccagctcggtatagtgcagcggcaacgggccgtttggcccccatagtccgaggctgtacaggctcaggtgcaggcgtccatcctgccagctgacctgggcgatttcccgtggcgcaaaggtcatcgtcggcgtctgtcccagacggaatttttccatccgtggctgccagatactgcctgccggagtatcacagagctgggcatccacgcgccgcatcaggttcaggaatccgtaacgccagggggttttctgcgcctggttgagagcgccggtcatacgctcccccgttgcccggttctgaccggccaggtcatgacatgcccgcgttgcatcgagtgcagcgtcatctgcgagaaggtattaatggaaacatggcgggcaatatagtgttccagcaccagaccgaacaggtaaggactgataccggaaaatccttcttcgtccacggtcagttcgcaactgacgccccggccatagaccaacaggccggagccgggcaggcggcgggtcaccggggtggttttgcagccaatcaggctgcgcacctggcgcgactgcgggctgtcgtgagccgggataaacagattcagcagatcgcgcagcgcctggccgccggtgcggtgatccagatcggccagcggcagataattaaacgacaactgccggatcagccgccaggccatttcgcgttcagccagcggcggctgcggcgggcgcggcggtctgataagacccacgcccgccaccggaatcgccgcatctacggtcagatcatcccggccattacgtggaataaggcagggcagatcgcggttagtcaccattgccgtgacggtgatatggcgcagattttccgggtagggcgcttcatgctgatcaaccagcgagaggaagacttccgagccggtatagggggttcgggtgccatagcggcgggcgttttctgacgagcggcgcggttcacgacgcagtgaaaaataacgcccgtggttgccttcgtcattattacgggtgtgatacagcggacgaaaaatcatcttccgtgtggtttccgcttccaggccttcgacttcctgaacagaaaacacctcgtaatccagcggacgggtacgatccaccaccagatgctgttccgtcacgctgtgagtgacttcaatccgggtggtggtgcgaggaagcaggttgatcaccggcgtacagaacaggctgaactgtgcagcgtccgtctgatgaatcagccagtccggcggcaggcggttaagcagtatgacaatttccgccacattgccctgcaccttttgtaacccggcagacaatccggtcggggtgaagaagtaaaaccgttccggacaggcgaaaaattcatgcagcagattatggccgtgaaacacgttccaggcgagcggtagcagcccctgccctggctccagcccttcgtgcgccaccgggtgttgaagattcacattcagttcgccgtcaaagtgaccgggttcaccggccagtgtggcgacggcgctggtatgtagcagctcaaacaggtgtgacgcaatgcgttcttcgccgcagaggtaaaagggcagccgtgccggaccggccagctcgctgaaagtcagttccccgaaggttcgcagggtgatgcgcaatgccccggcgacatgaatattaggcggcagatagcggtgcagggcgggcatatccggcggcgcggcggtcaggcgtacctcctcgatggacagcggccacagcgtgacgtcctggctgctgcgaaactggcaggcggtattttcgccttccgggatgggggaaacgaacgcggtatcgcgcggcacggtgacccctttcgccaggtcgccttcctgcgtatcgggatacagctttaccactgccatcgatggcgtgggggtgacgtaattggggctgacgacttccagtaaccgctgtgtgaagcggggaaactcggcgtcaatttttagctgagtgcgggcgctcagaaagctgaacgcctcgatcatgcgttccacatacgggtcggcaatatcggttccctgcatccccagtcgggcggcaattttgggatggagggtggcgaactcagcaccggtctcccgcaggtagctcagttcgcggttgtaatactccagtagccgtggatccatgaataatgccctgtattaaaagaacgtaatgcggctcagctccatatccagcgcgctgcgtaccagaaactccgtgggatacggctgcgtcagaatttgtccgcgaatttcaaactgtagcgtgttatagctaccctgccgggttttatcgagcaagggcgtgaccctgagtgtggcggcgttcagccggggttcgaaacggataatggcgcgccggatcgcctcgctgatatcgtcccacttatgctcatacataaagctgcccgccagcggcggcaggccatagttgagcactgacgccgccgcctgcggatagcgccgggcgtcgatgtcaccctcgtggctaatggtattgagcaaaaaggagagatcccggcgaatgatctccttcagttgtaccggcgtgacgctgatatcccggtcaattttctgatacggagcattgtcacacagccgatcaaacagcgtgggcagcaggtggttagcgggtgtaaaacgagacgtgctcatgcgccatcgttttcctgagcatgaaaggtacaatgggccatgtccagcaggctgatatcgccgtggctggtcagccacactttctgccccagcgcccgcacggtggtttcgccggggccgtcctgccaggcggtttccctgcacagacgcagggcgtcggatgcactttccgaaccgctgtaacgggtaaagagccaggcgccgtgcgtatcgccattcaccagggtgatattaacgggtttccacagcagatcagtcaggcgcgtcggttgcggcgattccagcgagcgtatttgcgaaaacggcagccagatatacacgccgccggtgactagctcaagtaccgggccaaggcgggaatcgctgtcgctcgcccagtcaaatgcgccgccgttccactgcccgcccgtgtctgttatggcttccagtgcggtattacggtgtttatcaacctcaccggtatcgtcatgacaggcgagtgccgccagcagtgactccacccaaacgggctgcggcagaagaaaaccgggtcgttgttcaccctgaaaaacggtgtggcggaacatttcgcagcgaaccagctcccggtacagccgggcctcctgggtataattggcctccatcctggcgcatagctgaagctggtgtagcgcccgcgaccagtctccggccacacacagcaactgaaacaggctgtggcggcagagcgctttcgccggattttcccgaacctgctgctccgccatctgaatcccctccgcaatagagtattcctgtatcagcgcggacagggtagcaggaagcgtgtcagtttttttcatgggcggtatttccatttttctgtgtcggagtgattcggtagtggctatcgatgccaataatacgatgctcgcggcgggtcagatcgggcagtatctcgctatgtgcggttttcccccccagttccggcgagagcagttgcaggatatcgggcattgattccatcgccagccagtgcatttcaccctcaccggtcgtgtccagcgtatccagaatggcatcaataccgggcgcgcctgccaccatatcctgtaacgtgtcggtgtcgccctttttatcgtataacgacgtcaaatcctgggtgacagcgtcttcatttcggggaaacggtttagcacggaggggcttttcctgcccggagggccgcaatgcctgctgatattcctggtaaagctggtgtagtgtgctatccgcttcatggccagtgtaagaggatgcggtttcccggacgggaataatatcgaacgggttctgcggattgagctgttgttgtttaaaccagtccagatccaggtactcagcaacggattcagatgactgaaccaactgaggaaacgaaacatcgggacgggactcatcattggtgcgggcaaggcaccaggatgacagaccccattcaatcgtatctccatcattcagccgcatacggtgatgaggttccatcacctgctcattgacggcacagcacagttcatcagagtgattaacaatccaccacgcctcttcgtggcgaacaagactgagcgcgatatcgtctttcccatgttgctcaaaaagcggaatgtagggggcggcggcagtaaatacgatgtatgtccctgcgggatactgtgcgttatccgttataccctgcgactgtattttccgtaattcccacatgtcttgtttcattatgtcccttaaatgtatttatttttctggaggaaacgtttagggagttttaattcataaataattttaactaaatttatagggagtcattattgatgacaccctttttattattttcgtcgtgaatgcattgttgtatgcatagatgtcttttttgaaatattatttcttttaattctgcaattgcgatttttatcttgctgttcattgattatttaatattaacggcttagttgctaattagtccctgatctgtatcattgttttgtttcgatattttttcgaggctatcaataaagaattgtttatatatttatatgcattgatgcattatttttatgaatttttatgtcacaaggcataacacatggaaactcctgtttcacgcagtgcgttgtatggaaaactggccggcccactattccggtcgctggaatcggcaacggcattttgcaaactacgctctaatccctgggttgagctgactcactggctgcaccagttaacacagcagcccgataacgatattctccacgttcttcggcattaccagatccctctttctgatgtggagaaagcgttactccggcaactggatatgctgcccgccggggccagcgccattagtgatttttctcaccatatcgatctcagcgttgaaaaggcctggatgctggcgagcgtccgttacggcgataacaaaattcgcagcggctggttgctgctggccttgttgaccacgccagaactgcgtcgggtactgagcagtatctgcgcgccgctggccacgcttccggttgatgaactgacggaaatactgccctcgttgatcgaaacatcgccggaagcgcaggagcgcccttacgacggctccggcctggcatcagccattcccggtgaaagcagtcaggcgattcccaacggcgggcaggacggtaaatccgcgctggcaaaatactgtcaggacatgacggcacaggcgcgcgacggcaaaatcgacccggtgacggggcgtgagcatgaaatccgcaccatgacggatattctgctgcgccgtcgccagaataatccactactgactggtgaggcgggcgtcgggaaaacggcggtcgtcgaaggttttgccctcgcgattgcgcagggggaagtgccgcccgcgctgcgggaagtacggctactggcgctggacgttggcgctctgttggccggagccagcatgaaaggcgagtttgaatcgcgtctgaaagggttactggaagaggccgggcgctcgccgcagccggttattctgtttgtcgatgaagttcacactctggtgggcgcgggcggcgcatccggcacgggcgatgccgctaacctgctgaaaccggcgctggcgcgcggcaccctgcggactatcggcgccaccacctggagcgaatacaagcgccatattgagaaagatccggcgctgacccgtcgttttcaggtgttgcagattgccgaaccggaagagatccccgcaatggaaatggtgcgtggtctggtggatacgctggaaaaacaccataacgtactgattctggatgaggcggtacgtgcggcggtacagctttctcaccgctacattcccgcccggcagttgccggataaggccatcagcctgctggataccgccgcggcccgcgtggcgctgacgctgcacacgccgcctgccagcgtacagttcctgcgccagcagctaaaagcggcggaaatggaacggtcgctgttgcagaagcaggaaaaaatggggattcagtcagatgagcggcgcgatgcgctgatggcgcgaattttctcgctcaacaatgaactgactgcatccgaatcccgctggcagcgggagctggaactggtacatacgttgcaggaactgcgtctcgcagagtctgatgctgatgacaaaaccacgctgcaacaggccgaaacggcgctaagggagtggcagggcgacgcgccggtggtgttcccggaagtcagcgcggcggttgtcgcggcgattgtcgccgactggaccggtattcctgctgggcgcatggtgaaagatgaggccagccaggtgctggaactgcctgcccgactggcgcaacgcgttaccgggcaagacggcgcgctggcgcagattggtgaacgtattcagaccgccagggcgggactgggcgatccacgcaaaccggtgggcgtgtttatgctggccgggccgtccggtgtcggtaaaaccgaaaccgcgctggcgctggcggaggctatctacggcggcgagcagaacctggtaaccatcaatatgagcgagttccaggaggctcacaccgtttccacgctgaaaggcgcgccgcccggctatgtgggctatggcgagggtggtgtgctgacggaagcggtgcgtcgccacccctggagcgtagtgctgctcgacgagatcgaaaaagcgcaccatgacgtccacgaactcttctatcaggtgtttgacaagggtgggatggaggacggcgagggtacacatgtcgatttcaaaaacaccacgctattactcaccaccaacgtgggttccgacctcatcagccagatgtgtgaagatccggccttaatgcccgatgctacggggcttaaagaggcgctaatgccggaattgcgcaagcatttcccggcggcatttctgggccgcgtgacggtgatcccttacctgccgctggacgaaacgtcgcgtggcgtgattgcccgtctgcaccttgaccggctggtggcgcggatgagtgaacagcacggcgtgacgctgacgtatagcgaggaactggtcgcacatattgtggcgtgctgtccaatgcatgaaacgggcgcgcggttgctgattggctacatcgaacagcacattctgccacgactgtcgcgctactggttgcaggccatgacggaaaaagccgcgatcaggcagattgatatcggcgttaatggtgatgagcagattgtttttgagatcgtttgctgaaaccggccgttcgaagtgtccgtagtgcgattttaaaaactgtaccggtataccgctccccttgcggcaaccagttgactaaaaaggaaatgaaggattatggctatcaacaatagcgcgcagaaattcatcgcgcgcaaccgcgcgccgcgcgtgcagattgaatatgacgtagagatttacggttccgagaaaaaaatcgagctgccgttcgtgatggcggtgctggccgatctggccgggaaaccgcgtgaagaactgccgccggtgacggatcgcaaattcctcgatattgatattgataacttcaatgagcgcatgaaagccattgcgccgcgcgtggcgttcgctgtgccgaatacgctgacgggtgaaggtcagttgatggtcgatatcacgctggaaaatatggacgacttttcgccggcacagattgcccgcaaggtggacgccctgaaccagttactggaagcccgcactcaactggcgaacctccagacctacatggatggcaaggcgggggcggaaaatctggtcaataaactgttgcaggacccgactctgctgaaaacgctggcgaatgcgccgaaatcggccgctacccagcaagatgtgtcagcggataatgaatcagcggaataacgtcgaatttttaaggaattttcatggcaaacagtaatatgcaggcaaccgacgcggttgctcaggataccgcctccgcatccggtgaatttgatgcgttgctgaatcaggccttccgacccaagactacccaggcggcaaaagccgtggaagccgcggtgcagacgctggcgaacacgatcaccgtcagcgatgacgcctataaaagcatcagcgctattattgcgcagatcgactttaaactgaccgaacagatcaaactgatcctgcaacatcccgactggcagaagctggaatcctcgtggcgcggtatggagcatctggtttacaacaccgagaccgacgaaaagctgaaaattcgcttcatgaatctgtcaaaagatgaattgcggcgcaacatgaagcgttacaagggcatcgcctgggatcaaagcccgatgttcaagaaactgtatgaagccgaatacggccagttaggtggcgaaccttatggctgtatcattgcggattactacttcgaccatacaccgcccgatgtggatctgcttggctctatcgccaaagtcgccgcgtcggcccatgcgccgtttattgccggggcttccccctcggtactgcaaatggactcctggcaggaactggcgaatccccgcgacctgaccaaaatcgtcacccagaacctggaatatgcgccgtggaactcgctgcgggctagcgaagactcccgttatattggcctgacgatgccgcgttttcttgcccgcctgccgtatggcgcaaaaaccaacccggtggacgagtttgattttgaagaagatgcggatggttctgaccataccaaatacgtctggagcaacgcggcctacgcgatgggcgtaaacatcaaccgttccttcaaacactacggctggtgtacgttgattcgcggtgtggaatcaggcggtgcggtggaaaatcttccctgccataccttcccgactgacgatggcggcgtggacatgaaatgcccgaccgaaatcgccatctctgaccgccgcgaggctgaactggcgaaaaacggttttatcccgttgatccaccgtaaaaactcagactatgccgcctttatcggcgcacagtcgctgcaaaaaccacaggaatactacgatccggacgcgacggccaacgctaacctgtctgcccgtctaccgtacctgttcgcctgctcgcgcttcgctcacttcctcaaatgtatcgtccgcgacaaaatcggttcctttaaagagcgtgaggatatgcagcgctggctaaatgaatggattatgaattatgtcgacgccgatccggtgaactcctcgcaagaaactaaagcccgtcgtccgctggctgccgctgaagtagtggtggaagaggtcgaaggcaatccaggttattacgacgcgaaattcttcctgcgtccgcatttccagcttgaagggctgacgggatcgctgcgcctggtgacaaaactgccgtcagtgaagcagggcaatgcctgatatatattttgtgaatgtttaagcgagtgaagtcagagaagatagagaatataaagagggatatgaagaaaagaatttcgtctcgcccacggtctcgtaaaggtggggtacgtaatgatgacacatatccgaatgccagtaacaatgccgaagctttttatatcattgagtaggaaatacatattatgaccataagcccaacttttcatctgttacctggtattgttctgctcttttcacaatatgctgtagcctgggaagtcagttgcccggctgttattgatactcagtcttctgctgtgagcctgaagtctgatgtcccagcggcgtggcagctttctccccgatatatgtcgcgtttatggttaagtagtattggggtaacgcagggtaaacctgaaaacctgatggatctcaaaccagagactaaaaaagtaaacggtgaaaattggtctgtatgggaaacagaacgtggtagcgataaagaaaccgatcgctattgggtttcgtgtatttatggtcatgaacagatatggttgacgcaaccaatacctgcttcttctactcgctgtaagactcgtaattttgagggatcgccagaagaccagtctgtatcttttatctgtaattagcgatttgagacgtgaaaatttcagtacaggttatggtttttattatcggaagttatgaagcattatttatatgcattaaataatgcaaattcataaaataactaaatacattatcggtaccggaaaaatatacagtcctctgttctcctgaagttattggagaaggattctgtacggcaatgatttatctataaacaaaaagatatagataaaatcaggtttattttaagtaaaacttaataaggatataaaaatggcttatgacatttttttgaaaattgacggcattgatggcgagtcaatggatgacaaacacaaaaatgaaattgaagtactgagctggcgctggaatattcatcaggaatccaccatgcacgccggtagcggcctcggctccggtaaggtctccgtcaccaacctggattttgatcactatatcgaccgcgccagcccgaacctgttcaaatactgcgcctccggcaagcacattccgcaggccattctggttatgcgtaaggctggcggcaatccgctggagtacctcaagtataccttcaccgacctgattgtcgccgtggtttccccgagcggcagccacgatggtgaaatcgcctcccgtgaaacggtggagctctccttcagcaccgtgaagcaggaatacgtggtgcagaaccagcagggcggcagcggcggcaccatcaccgcaggctacgacttcaaggccaacaaagaaatttaacggctgtttttccggccagatgttatgtctggctggttttattgttttgattttaaaggaatttacagtgaataaatggcgtaaccccactgggtggttatgtgcggtagctatgccttttgcactgctcctgctttccggatgcggcagtagcgattcgctacttgacccctaatcgcagcggcctggcctgagcgtgaaagcgttttacaaggtgaattctgacaatcagaagaaagcggcgtccatgaagatacgtgttgagaattaatgacctacacagaatttttagaggttaagcaaaatgaacagaccttcattcaatgaagcgtggttagcttttaggaaggtgaatcattccgtcgctgatgtgggtagcattattggtggaaacgttgggaaaaatataactggtggttattttcaaaatgcctgccctattcgaatgagctatgttttgaatgcgacagggttcccaatagcccgtaactctccgtatgcaaaggttagtggtgccgataataaattctatatttatcgcgtgaatgatatgattgattatcttactcatactatgggcaagcctgatcttattgttaataatccgaaacagagtgactttatcgggaagaaaggaattatcgtagtaaaagggcatggctggagcaatgccagaggacacgttacattatggaatggcagtatctgttcagatcagtgccacttattaaatgacccagataatggaccatttgttcctgaagttgggacactgtggatactgccgtgaaatggttaatattagttactttcagcataagtggaatgctggtatggcagccatcctttgcacaagaagcattgaccacacaatattcacagtcggaactcttaaaaaattgggcgctgagtcattgtctggcattagtatacaaagatgatgtcgttaaaaacgatgccagagctacggccagtgcttaccttgaatatggtaaacaatctgtggagatttaccatgaaattgatgagattgcgaaaaaatattcagggttgaaatataacggttcgatatcatcagattttaataccatgaagtgcatagattttatccatgacagggaattaaatgaattaattaaaaggcgtgtcgagaagtaaaattcaaagatattaaaagcatacgttctcttgctctgatgaatttatgggtaagaaagagctgtacaggaatagttaatctgttcacctaataaagcagataaatcagggcttaatttaggtagttaaaaggatagtagatatgtcttatgacatttttctgaaaattgacggcattgacggcgagtcaatggatgacaaacacaaaaatgaaattgaagtactgagctggcgctggaatattcatcaggaatccaccatgcacgccggtagcggtctcggttccggtaaggtctccgtcactaatctttcatttgaacattacatcgatcgcgccagcccgaacctgttcaaatactgctcttccggtaagcacattccgcaggccattctggttatgcgtaaggctggcggcaatccgctggagtacctcaagtacactttcacagatctgattattgcaatggtatcgcccagcggaagccagggaggggaaattgcgtctcgcgaatcaattgaactctccttcagcaccgtgaagcaggaatacgtggtgcagaaccagcagggtggcagcggcggcaccatcaccgcaggctacgacttcaaggccaacaaagaaatttaacggctgtttttccggccagatttatatctggccggatttattattttgattttaaaggaatttacagtgaatgaatggcgtaaccccactcggtggttatgtgcggtagctatgccttttgcactgctcctgctttccggatgcggcagtagcgatgcgttacctgacctcgaatcacagcgactcgacctgagcgtgaaagcctccgataaggtgaatcctgacaatcagaagaaggccgcgcccattgagatacgtgtttatgaactgaaaaatgacgccgctttcacgacagctgattactggtcgctccatgacaacgacaaatccgtccttaccgacgatttagtgcgtcgcgacagctttattttgcgtcccggcgaagagaaaaaactgcgtcgcccgctgaatgcgcagaccacggcaatcggcgtactggccggataccgtaacctggccaaatcggtctggcgggtaacctacaaaatcccggaagccccggaaaaagcctggtacagcagcttcatatcggggaaaggaaaagtgcagttggaggcggaactggaacaaagcgccattgtaattacggaacgggataaatgaattatgagctggaatgaccgcgtagtctggagtgaaggacaatttttactgccgcagatgtttcagcagcaagagcgttatctggaacacgtcatgcattaccgcagcctgccgctgaccccctttttctggggattcagccactacaatattgatggcgaagcgctgaacatcggtaaactgatactgaaagaggcatcagggatttttcctgacggcacgccgtttaacgcaccggaccacaccccgctgccgccgccactgaccattctgccggagcacctgaaccagcagatttgtctggcggtaccggtacgcgcgccgaacagcgaagaaaccacgtttgacaataacccggaatcattggcgcgtttctcggtacatgaacacgacatccgcgacgccaactcgctgggacgtggcgcgcagttattacagctcagtcatctgcgcctgcggctgctgccggaaaaggcggtgacgggcgcctggattggcctgccgttgacccgcatcaccgggttgaaccctgacgggcggatagatatcgaccacgacctgatcccgcccatcattaattatcaggccagttcactgatgtgtacctggctgtcgtggatcaacgatctcatccggatgcgggccgattcgctggcggaacggctgaccggcagcgacaaccacggccatgaagcagcggaggtctccgattacctgctgctgcaaattctcaatcgctttgagccgctgctgactcacctggcgaaaaccccgctggccccggaggtgctgtaccgctacctgtccgaactggccggggaactctccacctatgtgcgtccacaaacgcgacggcccgctgaatacaaagagtacaaacacctgacgccctatgccgggttgaaatcgctggttgatgaggtgcagttcctgctgaacgcggtactgatccggggcgcgcagcgcatcgagctgaaagaggggacttacggcatcctgaatgcggtggtggccccttccgatcttgccgatttcagcacgctggtactggcgataaaggcttcaatgccgaccgatgtgctactgcaacattttgccgcccagaccaaaatcgggccatccgatcgcctgccggaactgatccgctcgcatctgccggggctggctttgcaggttctgcctgtaccaccgcgccaaatcccgtttcaggccggatacatctattacgacatccgccgcgagggagcattgtgggaacacattgcccgttacggcgggatggccatgcataccgccggggaatttccggggctggagacagaactgtggggagtgcgcgataaatgacagacagtaccctgacgccgccagcggcggatatgatgtcctttttgtccaccacgccggaacataaggacagtgaatatgaaacgccggtacacaccagccagcgcacggaactcaatgtcatcgttgaagacggtccggacagcaaactccggctggctgaaatcagcgcggcggctaacccgttgctcgccgctgcccggcctttattgtgcgctctcgcagccatgcccgctaaactggatgcggccctggtagagccttaccgtaatctgctggtacgcgagatgcatctgtaccagacattatgcgatcaggcgaacctgcggcgcgagcacgtactggcggtacgttactgcctgtgtacggcgcttgatgaagccgccaataacacaacctggggacggcgcggcgtctgggccggaaaaagcctgctggtaacatttcatggtgaaagcgaaggcgggataaaacttttccagatcatcgggcgtctggcggccagcttccaggagcatggcaacgtactggaggttatctaccacctgctggggttgggatttgaaggccgctacagcgtgcagccagacgggcgtaagcaactggacaatattcgccagcaactgctgacacagctttcacagcgtcgcgatccggttatgcccgcgctctcgcctgactttcagggggcgataagcggacgactgcggcggatgcgccgggtgccggtctggctgagcgccgggatagccctgttggcgatgctgacgctgtttggcctttacagccaccggatggatgtgcagaccgtcaccgtacaacagcatattgatgcgattggtataaaactgccgccgccgcctgtgccggttcataagctgcggctgaaaatcctgctggcaaacgaaatcgcccgtggcctgctgaccgtggacgaagatgaccagcacagtagggtggtcttccgtggcgacgccatgtttgtgccgggacagaaaacggtgagtgacgcaatccggccagtgattaacaaagcggcgcgggaaatcgcccgcgtgggcggcgcagtcactgtaacgggtcacactgacagccagcccattcattcggctgaattcccatccaacctggtactgtcggaaaaacgggcggcggaagttgcggcgttgctgacctccggcggcgtacctgccggacgggtacatatcgtcggcaagggcgatacggtgccggtggcggataacggcagtaaagccgggcgggcgaaaaaccgtcgggtggaaattctggtagtggagtgaatgaatgatgaaaaaatcaacctatgatgtgtctcatcattcggcagtatgtggcgtgacgggggattattatcggatctcagcgacatatcacataacacgatctgttcgtgtttttttgatcatcttatgttgcctgttatccggtggcgcttttgccggatccccgattaacgcaggattcatttcccccgataatgtcaacctcagtactcaggatttcctgaaattttatgccactgacaacgtacagaaaaaagacaatgcactgatgtatatgctgggggtggaggatgcgacagaaggtaaagcctggtgtggatatggtcaggttgacagtataacaataaaccatactgtgctgacctggtttgaacagcacgcagtgaaaaagcctgatgtaagggcttcaatactaatagaggaagcattagttaaaaattttccctgtcagaggacagactcctccataaaaattgcttcccggtcatctcccattttatccctgacgccggatgcgcttaatctttcaggtaatgacttttttaaattttgggtgtctggtaatcaacgggataaactcagggcgggtgtctatctgctcggcgtggaggatgcgacagagaacaaactgtggtgtggatacgctttatttaagacgctaacattaaatgaattagtctatgtttctcttaaaaataaaaccaatgaggaactgaattctcgcgcggctgaacttatcataaataaattaatagagtatccctgtaatatataaaatcattcaagttgcatcaaggcggcaagggagtgaatccccgggagcgtacattagttcgtgactggggtgagcgaggaaagccaacgcacatgcagcctgaagtatgacaggtataccctgtgataatgttatcgctgccagttcagataaagtcttggtggtaaagtcttggtggtaagatattgatatgtttaaggtaatggtctgtctgttggtgggtgttcctgccatttcttatgcgcacgattatgggtgtgctacggttggagcatcaatggagtcatcattatttgatgccataaaaaatgacctgaatatagatgtcgctactattataaaggataaaacaaaggtagagattcttgatatctcacctgtatctaaggtctatgcagaatctctggccaggatggattatgaaaaagataaggccaaaaataaagtggcaatattagataaaaaatcctatttcgatagttactatgaaaatcaggttaaatctatcgtggcaaaatatacctatattaacaaagataaagaaaaagatattttcattgcatccagcttcatgaatgctgatgagtgttctgtaagatttaatggttatattactttatccagggaattttaaaatattgattattgggtggcgagtcgaaatataatgcaaaaatttcttagtctgcttttttcccggcgcgcgctggcagttgtgggcgttctggttctggcgctgctggtctggtttgtcgggccgctggtgtcatttgataccctgcgcccgctggcctccgtgggtagccgggtagtgaccattgccctgttgctgatgctgctggtactgtggctggtcaactggtcgatgagtatcatcggcatcagtgtcctgtgcctggcgattggcttcgtcacaccgctgctggccctgggcgatgtccatccgtttgcgccgctgtgggtccgcctgaccctgattggtttcatcctgctgatgtacgcgctgtacggcctgtaccggctgtggcgtgcgctgcgtatggatgaacaactgctgcgtcgcttcctgcatccgcgcggggaagaggtaccggtggcaggcgagatcaaagccgacctgcgcaccgtcaaccatattgtcacgcaggccatccggcagctgcggcagttgcgggtggatatgcctggctggcgtaaaatcttcgagggaaaacgctttctgtatgagctgccgtggttcatggtggtcggcagtcccggcgacggcaaaaccacggccctgctgaacaccggattgcagttcccgctggcggagcaaatggagcagacttcgcgcatcctgacagtaccgggtggcggcacgctacactgcgactggtggtttaccaacgaagcggtgttgattgataccgccggacgctacgcccgccacgatgacggtggtgaagcgagcgccgcgcagcgtaacgccggagagtggcagggctttctcggtctgctgcgtaaacatcgccccggcgcgccgcttaacggcgtgatcctgacgctaaacgtggcggatttaaccgcacagtcaccggcggaacgcctggcggcctgcgccgctctgcgggcgcgactggcagaactgcgcgagaccctggggattcgctttccggtctatctggtggtcaccaaaatggatttgttgccggggttcagcgaatattttcgcacgctgaccagccatcttcgtgcacaaatctggggcttcacgttgccgtacagccgcaggcgaaaagcgggcgacccgcaggcgctgcacgccgcctgcgcgcaggagctggcgcgcctgacgctgcggttggatcagggactggatacccggttacaggaagagtacgaccttaaaagccgccagcggctgtataccttaccgcgtgagttcgccgccctcggcgagccgttgctggaggctattgaacagatcttcctcgattcaaaattcgatgccacgcaactgaataacacgctgcgcggggtgtttttcaccagcgccgcgcaggcgcaggccgacgccgtggccgaccagttgagtatctggcagcgctttgtccgggcgataaaaaccgcccgtggcgaatcctccgcctctctcccacacgctctgccggacggcaaccgcagctacttcctgcatgacctgctgacacagtttatttttcgtgaagcgcacctggtggagccaaacctccagtgggcctggcgttaccgcctgctgcgcctcggcgggcacctgctggtactggtgctggcattcctgttgtggcaggggatgcagaccagccagcagaccaacggcgactatctgaatgaaatcagcgcccgcgcgacccggctggacggtgatgtgaaagcctacaccggtaaaccggcgatggctcccgtcccggcactgctggacagcgcaagggaactgtccgcctggccggaactggacccggacgcgccgccgctggcctggcgctacggtctgtacagcgtaccgccggtaaccgacagcgtggcgtcgctgtacaaccgtctgctggatcaactgctgctgccgccgctggtgaaacggatggagtatgtgctggcggacgccattgcccgtcaggatagtaaagcggcctacgatgccctgcgcatctatctgctactgaatctggataaagatcacgaagataaatacaacgcggcggagatccagtcgtgggtgattaacgatctggggaacagcgacagcgtggccgggttcggcgggcgcgccgccgtgctgacgcatatcgaagcgctgtttgacggcagccgggtggtgcattcaccgtatgagaaagatgaggcgctgatccgccaggcgcgggcattcctcgacggtcacaccagtaccgagcgtatctacgcgcgggcgctggcggcaatggagagcgaagcgccgcaggagttcacgctggtacgcgccgtcggcgcggatgcgggaacggtctttgtgcgtagcaacggcgcgccgctggatcggggcgtgccgggtatttttacccgtgaaggataccgggagctgttcgacaaacgattaccggaatttgtggcggcggcgacggcgaacgatggctgggtgatgggccgggagagtacgccaaaaaagctgactgacagcctgcgcagccagataccggggcaggagcagtctgtcgcccgcgaagtccgccgtttgtacctgacggaatatgcccgccgctggcaggattttctggacagtatccatagtatcaacagtgccggggaagagggcagttccggcctggcctatgatttacaggtgctgcgcaccctggcgtcgccggactcaccgctgatgcggctgggaaaagcggtggtggagcagaccacgctggtgccgccgccggacccgcaggccagacagaaacaactggcgcagcgcgcatccggtaacgcggggaaagtggtacagacggcaaaactgttccaggatattcacccggaagaacggctggaaaaaacgctggtggatgatcgtttcgccgcgctgcgcgaggtcattgccgggcggacggacggcggacagagcggcggtgggacgatgcagatcgcttcgctgctgaccatgctcaacgagtattacacccaactgaccattgctgatagcgcgctggcggcggggacgttgccagcgcgcattactgccgcagacaagttgcaactggaggcggcgaaactgcccgcgccgctgaaaaacatcctgctggatctgacgaagcagggaacgcgcaaaatcaacgccgggaccggcgacgtgctgaacacccagatggaggcgatgatgggcgacgactgccgtgacgccatcgacgggcgctatccgttcgccgacagtccgcaggaggtcagcgccgaggactttaaccgcatcttcgccagcggcggcgtactggatgctttctggagcaaacaactggctccgctggcggacaccgccagcgacccgtggcgctacaaaccgaccgaaggcaacatgacattgcaggggccggatctgacgccgtttcagcaggcgaagcagatccgcagcgtattttttaacagcgagggcgggaaaaaattttcctggtcgatgcagattagcgtggtggatatggacccggccatcacggaactggtgattgatatcgacggccaggtgctgcgctacgcccatggtccggaccgtcccctgaaagtaacgtggccgggaccgcgcaacggctcgatggcggaaatcaccgccagcccgcgtattcgccaggacacctcaacgctactgaccggcgggccgtgggcgctgtttcatctgctggacgccggaatggtacaggaaacggcggtgcgggggcgtcaactggtggaatatgattttgacggtcgccgggtggtgctggaaatcaccgccgggcgggattttaacccggtcagccgggagctgttgcagaacttcagttgcccggcgagggcgctgtaatgcgccggccagcagtggtatcagccccggcgatgttcggcaggctgccggaccagcgcgactatgtgcgctggcgagtgggcgctgaagagggacgaatatggcaggactggctgaaccgccagacgtgggtgggcagcgggcggcatatcgtgttgccgggaggccagacgaccgatgaagagcgtgacggctggatgcacctgtcgccgcgtggcgaacatgatatgcccgcgccggaacaccatccgctgccgtggagctttgtgatgtcgccgggatttttgccgatgggtgggacgactgactggctgaccggagtgctgatggcgtcacgggatagcgtgggacgcccgtggccgctggtgatttaccagcgctgcggtcgggagtggctggacgagagtttgcaggagacgcagggctggctgtactggctggcgaggctggcggcgcagcatatcacgccggacacgatgcggcgcgggcggctgaccgagcaggtggaccagctatgggcgatgtggcagccggggccgtggtgggcgcagtggctgcgtgggttacgacgtacatcgcaacgcagccgggaactgaccgggctgccggatgaagcaccggtagtagaactgccgggcgtgcgttatctgccgtggccgggctggccgggtaagacgctggggcaggcaacaccggggcaaggctggttctggcagcagaacagtgaagggcggtatgtggatgcgctgcggttggtggatgaaaaaaatagaggtcagatgctgtgaaaaagtacgctgtagaggttctgtttatgtctgcctgtgcaggaatgttcctgcccgtatttgcctggggcggaacagatgtaaacattgataacccgctggcggagtgtgtggatatccatcccgttcatcgtcaggaaatggataaccttaccattctgaaaacaacggtcacactgaaaaaaagcaccggtgaatgtggctgtttctcaacattaatcaactataccagcttactggcgcaggatgttgagggttacggacgcggaagtgcatattcccttcaggaggggaatatctcactggcgaagatgcagggacgttatcctttcagctttgtattatcggtggataaccagtctgtacgggatcagaagctggcgctaatgatacgttgtacaccaccgctgtaatacacagaatagtcagggagaagatgatggcagtaagactgacttttgacgggcaaaagctgacatggcctggtatcgggatatttaaggcgaccacggggttaccggatttacagtggccagataaacagtgtgtgccggatgcggcgataccggaagggaattataaattgtttattcagtttcagggggaggcaccgataagaaatgctgcggattgtgatctgggaccatcatggggctggagtaccattccgcgaggccaggctgccggaacatgtgagatatactgggcgaactggggatataatcgtatccggctggaatcagcggatgagaagacccgaaaagcctgtgggggcaagcggggtggtttttatatccatgattccaccaaaggttacagtcatggttgtattgaagtggaaccggtgtttttccgtattctgaaacaggagacggaaaaagaaaatggtgaaaagacatttacggttaatgttaagtatgtttctggtcagcaaacgaatggtggaacaaaacaataataccgttaaaaccggatgaaattatcgtgtctggacgtgctgtggttgacaatgattacaatggtggccagataagtaatgagcaccaatgataaagtatatgactggcggtgtgctggttattaatcaaatttctataaaatgcaatgcgaatctggtaagcgtaataaaaataaaatcataatattgttatgttcatttccttatttatgtaattcagtatttatgttatgtgctaatttttgtgtttttattttcatggctcttgtcagcaatataccctgttcttctggtaaatatttaaatataacaggctggttgcattataaagtgcggggcactgtttcctgacggtgagtctatttattttaatccggtattaaaggagtcactaccatgagttttgtatccacaaataataaatccggtatgggagggctgacgacaaccacgccgccgataaccggagaaagtggcggtgtcaccgcagattcagtcgccggaagcgtggcagatgcggcggaatccgccgtggaacaggctgcgggatcgctatttggcgcattgccggagccatcaggactggtgaaagccgcggtagcagcggcgcaggctgccgccgccgcaggtatggcgcaggatgcggtatcggccatcgtctctgctgttgcaggcgggccgggggcgcataatgtgacggtcagcggcagcgccgtaccgccgggcgcattactgttcgccagcctggacggcggcgaaacattaagtgaactgttcagctatgtggtacagctaaaaacgcccgacaccctgaatctgggctatgtctccccggcggccaacctgccgctcaaaccgatggtgggcaaagatctgtgcgtcaacatcgaactggatggtggcggtaaacgacatatcagcgggctggtcacggcggcgcgggtggtgggccatgaagggcgttcggttacctatgagctgcgtatggagccgtgggtaaaactgctgacccataccagcgactacaaagcattccagaataaaaccgtggtggatattctggatgaggttctggcggaatatccctacccggtggaaaagcggctggtggaaagctacccggtacgcacctggcaggtgcagtacggtgaaactgattttgattttcttcagcgactgatgcaggagtggggcatctactggtggtttgagcacagcgaggacagccacacgctggtgctggcggatgccatcagcgcccacaaagcatgtccggactcgccgctggtcgagtggcaccaggaagggctgaagctggacaaggagtttatccacactatcacggcaaacgagagcctgcggactggacagtgggtgctggatgatttcgattttacgaagccacgttcattgctggcaaacaccgtggcaaacccgcgtgaaaccggtcatgccacctacgagcattatgagtggccgggagactacttcgacaagagtgaaggcgagatgctgacgcgcattcgtatggaagcgcagcgcagccccggcagtcgggtgctggggggagggaatatccgcacactcatgaccggttataccttcacgctggaaaactatcccaccgccgaagtcaatcaggaatatctgctgatgcagaccttgctgtttgtgcaggacaacgcgcagcacagcgggcaggaccagcactttaccttttccacccgttttgaactgcaccccacccgcgaggtgttccgcccgcagcggacggtgagcaaaccccacaccaaagggccgcagagcgccatcgtcaccggcccggcgggccaggaaatctggacggatcagtacgggcgggtaaaggtacagtttggttgggatcgctacggcaaaatggatgaaaacagcacctgctggatacgcgtcagctacccgtgggcgggcaaaggcttcgggatgatccagatcccgcgtatcggccaggaagtgctggtggatttcaaaaacggcgatccggatctgccgatcatcgtggggcgtacctacaaccaggacaccatgccgccgtggggactgccgggaatggcgtcgcagagcgggatcttcagccactcgctgtatggcgggccaacgaacggcaacatgctgcgttttgacgacaaaacgggcgcggaggaagtgaagttccacgcggaaaaagatctcaacaccacggtgaagaataatgaaacgcatacggttatggtggatcgcactaaaaccattattaaaaatgaaaccaacagtattggtgaggacagaaacaccacggtaacgaagaatgacggcctttccgtaaaactggcgcagacgatcaatatcggcaccacttatcgtttagatgttggcgatcaattcacgcttcgctgcggcaatgcggcgcttgttttacataaggacggctccattgagttttgtggcaagcaactgatgttacataccagcgatgtcatgcaactgattggtaaaggtattgatatgaacccggatggcggcacagccgtaaccgccgatgatattgccccccttctcacctctgagtgatctgaattaaacctggagttctcatggatcgaccataccgcatacaggaagggtgttttgtcctgcctgaaacatttacggatcgcagcgtcaatatttttatcctggagggcaatgaacgaacatcgcccagcctgaatatttcccgcgatacgctaaaacctgatgaagacctgcccgcctatattgaccgccagattgcactgatgaaaaaaaatctcggtcagcaccgggtattgtcgcgagcgcctgcacaggcaggaacgggcaatgatgcccttatgggggaacaaattgccgccacccataaatccgggaaaacggaagtgtaccagcgtcaggccgggtttattgcaacccctggcaaggtactggtcttcaccctgaccagtccccgtccttttgatgataaagcagacctactctggaacacctggctggcaggctttcagccggataaaaacgaataatcacacggaggtgtgaccatgtatgaagcagcccgtgtggatgatcctatctaccacaccagcgcgctcgccgggtttcttatcggcgctatcatcggcatcgccattatcgcgcttgccgcctttgccttctttagctgcggttttcttgccgggctgattctgggttttatggccgatcaaatagcctccggggtattgcaactgggcgaggccatcgggcgctccatccaccacacggcaggaaaaatcctcaccggttcggagaatgtcagcaccaacagtcgcccggcggcgcgcgcggtactgagtacggtgaaatgcgataaccatatcgcagaaaaacgcatcgcccaagggtcggaaaatatctacatcaacagccagcccgccgcccgtaaggatgaccacaccgaatgcgacgcggtgattgaagacggttcgccgaatgtgtttctcggcggcggcacacagacggtactggaaatcagttctgaaattccggactggctgcgcaaggtggtggatgtattgtttgtcgtggcgagtctgctcggcgggctggccggggcgtggcggcaggcggcaaagctggggacgaaatttggcactaaatgtgccgctaagtttatcggcggggagcttgtcgggatggccgtgggtgaggctatcagcgggctgttcagcaatccggtggatgtgaccaccgggcagaaaatcctgctgccggaaacggacttcaccctgcccggtcgcctgccggtcacctgctcgcgtttttacgccagccacctggaaactgtgggactgttgggacggggctggcggctgaactgggaaaccagcctgcgcgatgacgatgaacacatcacgctgaccggcgtacaggggcgggaactgcgttacccgaaaacgatgctgacgcccggccaccagatatttgacccggaagaacagttatacctcagccgcctgcatgacgggcgttacgtgctgcattacaccgatcgcagctattacgtatttggtgattttgacagtgacggcatggcatacctgctgtttatggagacgccgcaccgccagcgcattgtcttcgggcacgaaggaggcagactggtacggatagcctccagcagcgggcatcacctgttactgcaccgcacacagaccccggcaggggagcggctgtcgcgaattgaactggtgcagggcggcacccgtggcaatctggtggagtaccggtatgacgataacggtcaactgaccggcgtggtgaaccgggcgggaacgcaggtgcgtcagtttgcttatgaaaacgggctgatgacggcgcacagcaatgcgacggggttcacctgccgctaccgctggcaggaactcgacggcgcgccgcgcgtgacggagcacgacaccagtgacggcgaacattaccgctttgactatgattttgccgcaggcaccaccaccgtcaccggcaggcagggggagacatggcagtggtggtacgacagggaaacgtatatcaccgcgcaccggacgccgggcggtggaatgtaccgcttcacgtacaacgaagaccacttccctgtcaacattgagctgcccggcggtcgcacggtggcgtatgaatatgacatccagaaccgggtggtgaagacgacagatccggaaggccgggtgacgcagacgcagtggaacggcgagttcgacgaaatcacgcgcacggcgctggacgatgacgctgtctggaaaacgcagtacaacgcccacggccagccagtgcaggagacggacccggaagggcgggtgacgcagtacgcttacgatgaacaggggcagatgtgcagccggacggatgcggcgggcggcacggtggtgacggcgttcgacagccgggggcagatgacgcggtacaccgactgttcagggcgcagcacaggatatgaccacgatgaggacggcaacctgacgcgggtgacggacgcggaagggaaggtggtacgcatcagctacaaccgacttgggttgccggagacggtaaactcaccggggaaacagcaggacaggtatacctggaatgcgctggggctgatgagcagccaccggcgcatcacggggagcgtggagagctggcggtatacgccgcgcggtctgctggcggcgcacacggatgaggagaagcgcgagacgcgctggcagtacacgccggaaggccgggtggcagcgctgaccaacggcaacggggcgcagtaccggttcagtcacgatgcggacggcaggctggtgcgtgaggttcgcccggacggactgagccgtacttttatcctggacgacagcggttatctgacggcgatacagaccacgggcacgcagggcggcgtgcggcgggagacgcagcagcgggatgcgctgggccgtctgttacggacggagaatgaacacggccagcggacgttcagctacaaccggctggaccagataacggcagtgacgctcacgcccacggaggcggggcaacagcagcaccggatgcaggccgacacggtgcgttttgagtatgaccgcagcggctggctgacggcggagcacgcggggaacggtagcatatgttatcagcgcgacgcgctgggcaacccgacggacatcacgctgccggacgggcagcacctgacgcatctgtattacgggagcgggcatctgttacagacggcgctggacggcctgacggtgagcgagtatgagcgcgacagcctgcaccgtcagataatgcgcacgcaggggcagcttgcgacgtacagcggctatgacgacgacgggctgctgagctggcagcgcagtctggcgtccggcagtgcccctgttcttcctggccagcgcccggcgcggcagggctgcgtgacgtcgagggactattactggaacaaccacggcgaggtgggcacgattgacgacggcctgcgtggcagcgtggtgtacagctatgacagaagcggttacctgaccgggcgctcaggtcagatgtatgaccatgaccgttattattacgataaggcgggcaacctgctggataacgaagggcagggagcggtgatgagcaaccggctgccgggctgtggtcgtgaccgttacggctataacgagtggggcgagctgaccacgcggcgcgaccagcaactggagtggaacgcgcaggggcagctgacgcgggtcatcagcggcaacacggagacgcactacggctacgatgcgctggggaggcgaacccgcaaggcgacgtacgggcggcacacgggccatacggcgcggagccggacggactttgtgtgggaggggttcaggctgttgcaggagaacgtgcagcagcagggctggcggacctatctgtacgatgcggaacagccgtacacgccggtggcgagcgtgacggggcggggagaaagcaggcaggtgtggtattaccacacggatgtgacgggcacgccgcaggaggtgacggcggcggacggaacgctggtgtgggcggggtatatcagggggtttggagagaatgcggcggacatcagcaacagcggggcgtactttcaccagccgctgcggctgccggggcagtattttgacgacgagacagggctgcattacaatctgttcagatattatgcaccggagtgtggacggtttgtcagtcaggatccgatcgggctgaggggcgggttaaacctttatcagtatgcgccaaatcctctcaaatatatagacccacttggtttaaccgcgactgttgggcgatggatggggcctgcggaatatcagcaaatgcttgatactgggacagtagtacaaagttcaacagggacaactcatgttgcctaccctgctgatatagatgcttttggtaagcaagcaaaaaatggtgctatgtatgttgaatttgatgtgcctgaaaaatcattagtacctacaaatgaaggatgggcaaaaatagtagggccagattctatcgaagggcgattagctaaacgcaaaggtttgcctgttcctgaaatgccaacagcagaaaacataactgtaaggggcgagaaaattaatggggaagttgaagcaaaatgctaaataaatttaaattgtgggtgagcaaacatactgattatacggtaattcataatgaaaatgatttatcttacagtattattatagattttgaagatgaccggtatatatcaagatttactgtatgggatgacctaagctgtatgtcagaagtaatggatgtggatactggtttatataaattaaacaagagaaacgaattttctacatttgatgaacttctggatatatttgatgattttatgataagtattaaataatagttggccgggtaagaagttaactcttcccggctgttttattatctaacccccatcaatccggagacgcgctaccggtacgatgcgctgggcaggcgggtgagcaaggcgacgtacgggcggcacacgggccatacggcgcggagccggacggactttgtgtgggaggggttcaggctgttgcaggagaacgtgcagcagcagggctggcggacatatctgtacgatgcggaacagccgtacacgccggtggcgagcgtgacgggaaagggagaaagcaggcaggtgtggtattaccacacggacgtgacgggcacgccgcaggaggtgacggcggcggacggaacgctggtgtgggcggggtatatcagggggtttggagaaaatgcggcggacatcagcaacagcggggcgtactttcaccagccgctgcggctgccggggcagtattttgacgacgagacagggctgcattacaatctgttcagatattatgcaccggagtgtggacggttcgtcagtcaggatccgattgggctggcgggggggctgaatctttaccagtatgcgcctaatccgattagatggatcgatcctttaggacttgctatcctggagcatcaatctaattttgatgcggcaaggagaaccggatttgaaaatgcgggtatgacaaaccctgaggatgtcactttctcgaaagtcgatcccaaaactggtactgttgttgagtttaaaggtccaaatggggctaaagttgcttatgatgcacctcatgcagatatggatgtgacagcagggcatgataaaccacatgttggttggcaatccgcaggaaaaagaggttccggaggagctaatagaggtaatattacttatgatggcccacaacatccgcatcgctctgactctaagggagatgataaatgttaaattcaaatatgtctgaacttagaatcgaactggagaatgcgattaaaaatctcggtattcatgattatcgtgtcgataaacccgaacaaatcgtttctgagataaaagagatatatgttaatggtaatcctagaacctggtggttatcattaaaacatagacaatatgtcttttcttataccgataattctggatataaaaacatatcacaaatagtaagtaaacaactcaatgaaagcaatgtaatcaacaaacatatatttttgattgctgatgaagataatgagcaaatatatgtatataacgttcctcttaactccctgcctgaaattatagaaaattgcagatattttgaatattatgttgcagatcatgaactatcttggcttatatgtgaaaatgatcatggtgatttgattgtatgctcaaccattaagtaaagcgcgagtgctctttagcgatatagttgcccatatttaggcgttactagccgaagatggcgcgattgtctggcaggggaaacagcaattctgaggtcaggaagatagcataacccattaaccgggatagatccgctagacctgaatccagttgatgcgacaggttatagggtttatggttatttgctcctggagcaaataaaccttattacattggtattactaatgatatggtttgacgaagggccgagcattaaagcactggcaggttatcaaaagaaaatggaaggatgctgccatttgatgaaaatgtaatctaatggaaagtcagaggttacgagaaatattatatagagaaatataaaaccagaaccggaaccataggtgaaaaaattccctcaacaaatagagagaataaatataattcatttgatcatgggcgaacagatcccagcgcacaagcatttaaagactcttaaaatagtaagggagttggttccggtggaggaaaatgcggatgagtgattaagaattttggggctgtgataagaagtcgagaacaatgctgcgttttgtgaagcccggagacatattttgttttaaattagatgaagatagatattgttttgggcgaattataacactaatgactgtcggacatctttctgaattatttgatataattaaaaaaccccctggaataacagagttagaaattagtaatgcaaggcgaattattgaaccaattatagtggatacatattctttatttgataagaaattagaaaatggaagtgactggagaattattggtcatcaggttaattacaatccaaaaaatttagatggtatctattttgcacttggaataggtgattcctgtaaaaagaaagactgttacggaaatgattttctcatttcagaaagtgagtggaaaacacttcctaaattatctcctaaagggggttttgatatcaaaaaacggcttgaaattgcctgaaaatgaaaataaaaagccgggaaagatcttttgtcttcccggattttattatttaatccccgttcaccacattatttacccccgccttaatatgcttcatcgactttttcacctgataaagctccttccgtagatccctcacttcgtccgtctctgcaatcaggatcaaacacccctcggagatcttcacggtgacgccgtgcccggtctcaaatcccgcttcttcctgccagtcacccttaaggtgctggctggggatttgtgagtaacaggcggtcatgcaggtttcgctgttgatatggcggacgctgacgccggaggcattcatatttgctgactaaataaattcttatttatccgccggatgctggctgattgtggagctcagggtgagtgagtatgggcgcgacatcctggcaccgcgcctccctctccccggccagccccggccggtgatgagcagccggctgccggggccgtattttgacgatgaaacgggcctgcattaaaatctgttcagatattatgtaccggagtgtggctggttcgtcagtcaggatccaatagggctgaaagggggatggaaccgatatcattctccgctgaatcctattacagatagtgatcctcttggccttattacttgtggtgctgatagaggtgattctggcaagttattaagatgaaaaatggttgaaaataattgcgttagtgaatgctcatttatgcctttacctacaaaaagtaacggatttgcttgctggaattgtgttaacgaatgcaaataaaatcaatgctgttgatgtttttactacaggaataagtatggttaacgataaggatacagctatattaattagtgatttaatgttgagattcggtaaggagcttgatgaatctgttgctgttgttcagtcccgttgtgatgaggatgaatttaatgtatatcgagaaacggttggttttatcatgggtgaaatgcttattaaaataatgaatccattatatgaaaaacatccagaaataaaaccaaaaggattgaaacaaaacatctggaaccggatgaataatgtgtaaaagccggaggggttatcttttcccggctttttattatcaattactcattaactcctgttccgttcttttgcgtttaatcaccggaatatctccggtattgttcagcgccccggaaatgtttttaaccactgttctgcactccgtttattaatgcgggttacgcccatcccttcaatacagccaaagagtccgtgggtatgctgcggcgtgatcacgatgcaatccctcattacccgcaccttgacgggcatcccgttaataaaccccgcctgcggcatccattcaccgtacaaacgaactgaaagtctctcaacgcgtgagtatgtaagtatcccgcataatcgagccattcacatttagagatcatccgacataatcaatctgccaacgcaggagatcgctatgcgtaaagcccgtattactgcgcaccagatcatcgctgtgattagatcagtcgaatccggacggactgttaaagatgtctaccgggaggccggtatttctgaagccaccagggacaactggaggtctggatacggcggcagggatacgcgtggaatcacaaaaggctccaccgtatttactgtctgctcaagctgaattttcgccgtaagggtaaacaacggctgccggtacgcaatccctcgccactggtcacgccggaagcgctgaaccagagctggtctgtgggcgtcgttttcgcacgttcaatgttgttgatgactgtaatcgtgaagcgttgtcgattgaaatcgatctgaatctgccagctctgcgagtggtccgtgtactcgacaggattacagcaaccgcggttatctggccatgctgcgtatggataagggaccggaatttatctcgctggcactggctgaatgggcaaagaaacatgcagtaaagctggcgtttatccagccgggtaagccgaagaaaaacgttttcatcacgcgctttaaccggacataccgtacagaaatactcaattcttatctgttcagaacgctgaatgaggtgtgggaaattacggataaagggttatcagaatataactgcgaacgtccacatgaatcgcggaacaatatgataccgaaggaataccgccaataacgttatctggccggaatcttaaaaatgcatggaactaaaacgggtctatttacaggggcacctgcgatgaatttcgctgcactgaaaagcgataccggatgagagctgcttcaaattaatgtgccatgttcacggggaggttgtgcgacgtttgcataatccagcaagaactgaaaggaaggggagagctttttcatgcctgtataatcagtctggcctgtgtcagtcagctcttagtgttgagactctcgttggagcgttataattgcttttctgtttcggaaaacaagattttccattaaagatcttccctgcgaggaaaagttaactaataatcttaccgtcgagttaggagatgtatgtttaaatataaacaatgttgcaacgatgcctgataattatcctctcttcgaagataagtttcccacacccagtgtagtaggtgtcatggtaatgttatcacttgaatgtaaatggaaggtataattgctttttgactggcattctattccaccctgacaacacgatgttaacatcaacactgtttatattggcaataacgcaatttttttcagattaagaggtgctctgatatatagatttttatgacattacttatttgaattggtaacaaataccaataagtacaagctgttattaccagccacggattttttacatacggtaagatttggtatggcgttatgtattctggatgtgctggattattttaatttggtttaaaaaaggtggttattcaaatgaaaagcataaaaaaattgattatcgcaagtgcgttgagcatgatggctgctagttgttatgctggctcatttttgccgaactcagagcaacaaaaatcagtggatattgtgttttcctctccccaagatttaaccgtatcgcttattccagtgtcgggcttaaaggctgggaaaaatgctcctagcgcgaaaattgcgaagcttgtagttaattctactactcttaaagaattcggggtcagggggatttctaacaacgtggtagacagtactggcactgcatggcgtgtagctggtaaaaatactggtaaagagatcggtgtgggcttatcaagtgacagtcttagaagatctgatagcacggaaaaatggaatggggtgaactggatgacctttaatagcaatgacacacttgatattgtcctgacaggaccggcgcagaatgtcacagctgacacgtacccaataactttagacgtagtgggatatcaaccttaatagtaaacaactattagtgtattgtgccttgtttaaggcgcaatacacatcaaatcatctatttttcttttacaatttttgatatgaaaatagttaattttgctgtaatggcggtagctttgttcgccactaattctatggtttcagtatatgccgtcaaccagcaattaaattcagccactaaattattcagcgtgaagctgggggctacacgagtgatttatcacgctggtacggctggagcgacgctctcggtgagcaacccgcagaattaccctattttggttcagtcttcagtcaaagcagcagacaaaagttcgcctgctccctttttggtgatgccgcctctatttcgtttagaagcaaaccagcagagtcaactgcgtattgtccgtactggtggtgacatgccaacggatcgtgagactttacagtgggtctgtataaaggcggtaccacccgaaaatgaaccgtcggatacacaggctaagggcgcgacccttgacctcaatttgtccatcaacgcctgtgataagctgattttccgcccggatgccgtgaaggggacgccggaagatgttgcaggaaatttaagatgggtggagacgggcaacaaacttaaggtggagaaccccaccccgttttacatgaatttagcctctgtcacagtagggggaaagcccattacagggcttgagtatgtccccccctttgctgacaaaacactaaatatgccaggtagtgcccatggtgatatcgagtggagagttattacagactttggtggtgaaagtcatccgttccactacgttcttaaataaatccaggggcttagcggcagaaaatgaagttcaaacaacctgccttgctactgttcatcgcgggagtggttcattgcgcaaatgcgcacacttacacattcgatgcatcaatgttgggcgatgcagcgaaaggggttgatatgtcgctctttaaccagggggtacaacagccagggacttatcgcgtggacgtgatggtgaatggtaaacgtgtcgacacccgtgatgtggtgttcaaattggaaaaggatgggcaaggaacgcctgttctggctccttgtttgacggtcagtcagctttcacgctacggcgtaaaaacggaagattaccctcagttgtggaaagcagcaaagcccccagatgagtgtgcggatctgaccgccattccacaggctaaagcggtactggatatcaataatcagcaactgcaactgagtattccgcagttggcgttgcgtccggaatttaaggggatcgctccagaagatctttgggatgatggtattccggcgtttctgatgaactacagtgcgaggacaacgcagacggattacaaaatggatatggtggggcgtgacaactcttcctgggtacaactgcaaccgggaatcaatataggtgcgtggcgtgtccgcaatgcgaccagctggcagcggagtagtcaactgtcggggaagtggcaggcagcatatacctatgctgagcgtggactgtactcactaaaaagtcgtctgactctggggcaaaagacttcgcagggggagatatttgatagtgtgccatttaccggtgtgatgttggcatcggatgacaacatggtgccctacagtgagcggcagtttgctccggtagtgcgtgggattgcccgcacgcaggctcgggtggaggtcaaacagaatggttacaccatttacaacaccactgtggcgcccggaccgtttgcactgcgggatctgtcggtaacagacagtagtggtgatctgcatgtcaccgtgtgggaggccgatggcagtacacaaatgtttgtggtgccgtatcagaccccggcgatagcactgcaccagggatatttgaagtacagcctgttggcgggccgataccgatcgtcagactctgcaacggataaggcgcagatcgcgcaggctacgttgatgtatggtctgccgtggaatctcactgcatacggcggtatacagagtgcaacgcactatcaagctgcattgcttggtttggggggatctctcgggcggtgggggagtttatctgtcgatggaagcgacacacacagtcagcgtcagggggaggcggtacagcaaggagcctcctggcgactgcgttacagcaaccagctgactgcgacggggacaaatttttttctgacgagatggcagtatgcctcgcagggctataacaccctatccgatgtgctcgacagttatcgacataatggcaaccgtctatggtcgtggcgggaaaatttgcagccgagctcgcgtactaccctgatgttgagtcagtcatgggggaggcatttgggcaatctgagtttaaccggttcccgtaccgactggcgtaatcgccccggtcatgatgacagctacggactgagttggggaacctctatcggagggggctcgctgtcattgaactggaatcaaaacagaacgctgtggcgcaatggcgcgcaccgtaaagagaacataaccagcctgtggttcagtatgccattaagccgctggacggggaataatgtaagtgctagttggcagatgacttcaccatcacacggtggtcagacgcaacaagtgggggtcaacggagaggcattcagtcagcaactggattgggaggtgcgtcagagttaccgtgccgatgccccgccaggtggtggtaataacagcgcattgcacttggcatggaatggggattacggcctgttaggtggtgactatagctacagccgggcgatgcgccagatgggagtcaatatcgcgggaggtatagttatccaccatcatggtgtgacgctggggcaacctttgcaaggctcagtggcgctggttgaagcgccaggggcctcgggggtgccagttggcggctggcctggcgttaagacggattttcgtggcgacaccacagtgggcaacctgaacgtctatcaggagaatacagtcagcctcgatccgtcgcgactaccggatgacgcagaggtcacacaaaccgatgtgcgcgtggtgccaaccgaaggggcggtggtggaagcgaagtttcacactcgcatcggggccagggcactgatgacgctgaaacgggaagatggtagcgccattcctttcggggcgcaggttacagtcaatgggcaggatggcagtgctgctctggtggatactgatagccaggtttatctcactggtttggcggataagggcgaactgacggtgaaatggggagcacagcaatgtcgggttaactaccgcctacctgcccacaagggaatcgcgggcttgtatcaaatgagcggtctctgcagatagccgattctgaaggagagaataatgtggatgaaaatacagcgagtgaaaacggttatctatagcgtaagcttactggtcgctgccagtagcttggtgccgatagcgaacgccgcagaaaaacttcagacaacgctacgtgtaggtacttactttcgggctgggcacgtgccagatgggatggtgcttgcgcaaggctgggtgacttatcacggcagtcacagcgggtttcgggtatggagcgatgagcaaaaggcgggtaacacgcctaccgtattgctgctgagcgggcaacaggatcctcgccatcacattcaggttcgcctggagggcgaggggtggcaaccagatacggtgagtggtcgtggcgccattttaagaaccgctgcagataacgccagtttcagtgtggtcgttgatggcaatcaggaagtgcctgcggacacctggacgctggattttaaggcctgtgcattggcgcaggaggatacgtagccgtctgttccactcatacttcctgtatcagtgaataaggcgaatactgtatatcaggttcgaggatgtattgaaaatttactcaaggcaaatatggttagcaatcttcattgcagaaaaatcaattgctgattgattttaaaatctgaaattcatcttttttgtagggagaggaatattatgtttcgtaaaataatttaacggacactgatgcctttattatttctgttttgtggatttgtttgattcactcttttgtgagcggggctttataagcccctggtataaggtttgtttatctgtcaggtattcatatgtgatatttaagattttatgtttagggggctttttcttgtcccctcaggcgtaaaaataatttattttttacataaaggaataaagcatatgtcttatgcacgacatttaccggtattaatgtatcaccatgtcagtgataaacccggacagataaccttatctccccgtacgttccgggcgcagatgaaatggctggccgaatctggctggaaaaccgttactgctgcagaggtggaagctttttatcatggtgcaagattgcctcgtaaaagcgtcatgctgacctttgatggcggctggctggataactggttgcaggtttttccggtgctgcaggagtttaatctgcatgcgcatctctttcttgtgaccagtttgatcagtgacggaccggtccgtattcctgcaggcgaaccggtgtactctcatgatgagtgtcaaatgctggttaaacaaggccgggctgatgaggtcatgctgcgctggtcagaggtccgggagatgcacctcagtggccttgttgagtttcactcgcacacgcacacccaccgacgctgggaccagaagcctgtgtcccgtaatccgtcggatttgcttcgtgtcgatattcttcttagtcgtaagcggatgagggagatgctgggttattgcagtcagcatctgtgctggcctgagggctggtattgttctgactatattcatgtggctgaagagttggggttcacatacctgtataccacagaaaggcgtatgaacaatccagtcatcggttcacagcgtattggtcgtatcaacgcaaaggagcgaaagaatgtgggctggctgaaacgtcgtctgttttatcacaccacgcccggattttcttcgctgctggcccggcataagggggcacgtcggatagctgactgagccagagaccaggatgaaagtgctgcataccgaatcctcccccatcatcggcgggcaggggttgtaggctatatcccaaatgatggtgctgattttgagcagaaataagataacaccggaggccgtgatagacccggttgcgcagaatctggaggcagcaggtcactggcgcagggcttctacccgctggcttttggttatgggagattttgaatgtacagaggcccagcgggagtggttgttgttgcgccggaattattgccttgcgcagatatcttcccctggcgccagtaaagctggatatcagcgacgtgacgaaatgagaggagcctgcacataggtttgtgttttgagtaagtgtcttatttaaaccgtctgttctgtttcctccgctttcacaaataatgtcgagccgggtgggggactcaagtaagaataatctggcgatgttttgcttgtttccacgggatactttgttaggtgaacgatacaattaatgcgctccagactgcgtcacagaaaaggagaatgcctttgcagaacgggcgcatgacaatgaaccactttattattggtatctggttcggcgacaaccttgacgatcacgtctgagatagggtatttacactgagtggtaaacaggttcaattagtaaccggagatggatgcaaaatcatgatcgattcagatgctattttgcagccaatagattttttattaagatgatatcaaggacattgaggcacacaatgacgtatcagtaagtcgttgatagctcatttgatataagaatttcttttatcaacggaagataatgatggaactgatcaataatcgtggtatgcgagactggatgatatttattaaagtggcggaagtagggaatctttcccgggctgcgcgggaattagatattagcatttctgctgtcagtaaatcgcttagtcgccttgagaattctattgaggttactttacttcggcgcgattcacatcacttagaactgactggagctggtcagacagcctatgcaagcatgaaaaggataacatcttcctttcagtccttgctggatgaattgcgaaatccggataaaattatcagagggagtataaaattttcggctccggctattgtctgtgagtttcttgccaataagtggatatgggaatttacagctagctatccggatacaaaaatctacctggattcacgagagcgtagcgatttttttagtaaatccctggagtttgatgagctggtttttaaaagtggcataatcgaaagtgaggatctcgtgtatcgaaagataagccctttaaagttggttctttgtgcgagtccgaaatatatcagaaaatatggcaggatctcacaccctggcgatttggaaaatcacattattgtgggtcttcacaaccatggtctttccggacctcttactcttttccgtcaggatgaatcatacactattagtggcgctgttaatgttcatttatcttccaataatcttttgagtgttcttaatttggttttagaaggaaagggtatcaacctcatgactccggcctggcttgccaccaaatacttaaaaaataatgaacttgaaattatacttcctgaatggagggttccagatctccccatttatcttgtatggcgtcatcgtcagtattattctcctttatttcaacgctttctgtcttttattgaagataaatggaataatcgcccacaaattgattttctgaatgatgattaacccgtttggaatggttttgatacgttcctgacttaaacccacatgatgactgaattgaggcatcgagatatgcgactggtcagccagtcgtcttttgacgatgcccaatacaaaacatgatgccgactgacggaaatgataatacccggaaacaggacggggctgtttttgggcagccggaagttaagcccataccagaaacgttgcagtgtactgaaaaatggcgccaggttgcacctgttcaaagattttctgaaggcgcaggagtattcattactgatatcctccattgcgccttcgggaacccacaggaccagctattttaccgatagtgtttaaaaggcgtaagtaatgccgagcatgaagtcattggaggcagcctttgtgtctgcatcataagcggtatgttcatcaccagcatagtgattttttgaaatgcttactttgccagcattaatgtatttataactggcgtcaatcataatattatctgttacagcatattttgcaccgatacctgcgccccaggcaaagttattttttgaagcagacagagtttcattaataccaaaaccaacaggaatggtgttattacttagcttcacatgagcgaggccaacgcctgcgctgatatagggagtaaatgccgtactattgtgaaaatcataatagccattaaccatgtaagtggtcattcggacctgattttttacatttatgtgtactggatcaccaaatgcaataatatcctgcccgcctttagcatccgtctcacctctgaaagtggtatccagttctaaacgtactggaagctggaatggatcataaaagtcataaccgatagcaaccccgccgccaaaaacgcctttggtacggtcaggtaacgttgcatgaccattaactatctcatcctggctgaaggttgagttgattccatagacattgactacggatgtccccgctttcccggtgatatagatcccttcttttgctgatgcagtagcggaccaggctaccacaaggggaatgatgcagactgcgaaaaagtttttcatttcagaacctgccttaatattgggctaaaagacaagtttcacggtatagggtgtgatataacgattacataaacgaagcccaaaaaacggtctattgtaacgctgggttttctgtaagcgggtaaaaaatgagatgaagattttaaataacaatacgataatcgtcggtatggaaatccatctcctcgccaaattgccccacgtacggtttcacttctacgttatgtaacgggtagtgtgagatggagcgatgctgtaagaaaaagatgaagatgaatttgtacccgacctggataaagcccgttatcccggaataacgggcaaaaatatttactcaagtgcctgggcgagatcttgttgtacctgttgacgctgttctggtgttaagactttgcttaaatcaaaataatatttaacccgataatagcgagcctgttgttctatgttactgaaggctgcaagctgctgttttacggcggcgtcatcccatttaccggatttaatcacctctatcagcgcaccgtctttaattcccttcatagaaatctgactgacgtcggtttccagttgttggtgaagttttttgatccgggtaatctgatcgtttgtcagcttcagatgctggacaataggatcctgggcgggcaggggaggattggggacagcggtggcgaaagcgccaaaagaaacgcccgccagagtcgctgccagtaaagttgtgcgtacaaagtttttcatgaagatatcctgataagggagtgattaaccgtttttattacccacgaatggcgagcaattatcttagagcctatcccagtagggctattttacttgccattttggacctgggcagtgctcgccaaaacgcgttagcgttttgaacgccgctagcggcggcccgaagggcgagcgtagcgagtcaaacctcacgtactacgtgtacgctccggtttttgcgcgctgtccgtgtccaaactggctgcgccaataacgcctggtgggataggctcttagtcagaatacgttgcctgccacattacgccacgcgaatttgttttacggagagttacggagtgaaacaatcccgccgcggtgagcggcaggttgcttacaaggtgaatggatcggcatcgcgccaggctggaaatttttcgcgatagtcctgcaaggcgacgagagaaagatcggcatcgatacgtgtcgcctggtgtggttcggcggtggcgataatgtcgccctggggattaatgatccggctatcgccgcgataatgtagcccgttaccatcggtgccaacccggttgcagcctgcgacataagcctgattttcaatagcgcgcgccgtcagtaatgtttgccagtgtagcgagcgcggcgcaggccagttcgctacatacagcgccagatcgtaatcattgcggttgcgcgaccatatcggaaagcgcagatcgtaacagatcagcggcagaatgcgccaaccgcgccactgcacgatgatgcgtttatcgcctgcggcataatgttgatgttcatccgccatacgaaacagatggcgcttatcatagagatgaaccttgccttccggttcaaccagtaagaagcgatttacggcgccgcgctcagtttgtagcgccgcgctgccggcaatcagagcgtcagtttgtcgggctttggcctgcatccacgtaatcacgctatcttgcgaaagtgagttattagcggcctccatcgcgaagccggtggtaaacatttcaggcagaacaatcacatcccggccagatacgagctctagctgtctgtcaaaatgacgcaggtttgccgggccgtccatccagactaaaggttgttgcaacagagtaattttcaaaccagacacgatcggagctcctcattgaacagcgtctttacactgtagcatgagcaataataaaaaagcggcaagaaaaagccccgcgaaagcggggcaggaaagacacgagactgattatgcggcttcgactttacgcactttctccggcagctttaccggtttggtcgccagcgcttcaggttcaaaatcatcaacgttgatactgcgcaggcggctctcttccgctttcgccaggatggcggcttcatctttatctataagccctttcgccagcgcattgcgcgccagttcatccagacgagtaaacggcagatttttacccagttctttgcagatgcgctggtggatagggtcggcagcgatgacatcacgcagcgcttcttccagtaaaccgaccggattatgttcggcgggcgtcagatactgaccgcgcccaatgcgtgaacgtgtggcgttcggcacctgtaggatcttcgccacggcgtgatccagcttatcagacggcgccagataatgacggccagtcgggaagatcatcgcggtgagcaatccggccacgacgcggttcgggaagttctgcagcagatcgtccatcgcttgttcagcacgatacagcgcatcctgtacgccccagtgcaccagcggcaggtcggcttcgtggcgaccttcgtcgtcgtaacgcttcagtacggctgaggccagataaagctgactcaacacatcgcccagacgcgcggagatacgctcgcggcgtttcaggctgccgcccagtaccgccattgacacgtcagacagcagcgccaggtttgcgctcagtcggttcagatgctggtaataacgcttcgtggcgtcgccggttggcgtatggctcgttaatccgcgggtcaggccaagccagaaactgcggacggtattgctgccgacatggccgatatgtttaaacaacagcttatcaaaggcattcacatcattattctgcgctgcggccatctcttccagtacataaggatggcagcgaatggcgccctgaccaaagatcatcatgctacgggtcaggatattcgcgccttccacggtgatcgcgataggcgcgccctggtaagcacgcgccaggaagttgctctcgcccagcataatgcctttacccccagtgatatccatcgcgtcgataatggactgctggccacggtgggtgcagtggtacttcacgatagccgacagtaccgccggtttttcacccagcataatgccataggtgattaacgatgcggcggcatccatcacataagcgttacctgcaatacgcgccagcggttcctcaataccttccatcttgccgatagatattttgaactgacgacgaatgtgagcataggcgccggttgccagcgcgacggatttcaccccgccagtggagttggacggcagggtaataccgcgtcctaccgacaaacattccaccagcatacgccagccttgtccggccattttggggccgccgataatataatcaataggcacgaaaatatcgttaccgcgggttggaccattctggaacggaacgttaagcgggaagtgacgacgaccaatttccacacccggcgttgaggtggggatcagggcacaggtaatacccagctcttcttctccgcctaacaatctatccggatcggaaagcttaaacgccaggcccaacacggtagctatcggtgccagcgtaatgtaacgcttgttccaggtcaggcgcatacccagcacctgctggccctgccattcgcccatgcaaaccacgccggtatccggaatggcgcctgcatcagaacctgcttccgggctggtcagcgcaaagcaggggatctcctggccgcgcgccagtcgcggcagatagtgattcttctgctcttccgtaccatagtgctgcaacaactcgccagggccgagtgagtttggaacgccgacggtgatagccagaatcccggagacgccggacagtttttgcagtacacgggactgcgcataagcggagaactccagtccgccgtactcttttttaatgatcatcgcaaaaaaacgatgctctttcagataagcccacagttccggcggcagatccgccagttcatgggtaatctggaaatcgttcgccatccggcacgcttcttctaccggaccgtcgagaaacgcttgctcttcggcagtgagttgcggttgcggatagttgtgcagttttttccagtcaggcttgccctggaacagatcgccttcccaccaggttgtaccggcatcaatcgcttctttctcagtgcgcgacatcggcggcatgaccttacggaagccgcggaacaccggtgcggaaatcattgattttcgcatcggtgtgaggttaaacggcacgaggataatggccagaggaaccaacagccagatggaccacaggccagcgacgccaagtgcggcggtccaggcgagcagaatcaggctgctgagaaataaactcacgcggtgatagaacaatgcgccgagcagaacaaccgtagcgataatactcaaaatcatcataacgaaaagctcccttgcttgtaggaggtctgaccacttgtgatgattaggttgtagtggatgtaaaattttttagcaatgtgtttacaaaataattacaacaaagctcacattgttgccgtttttgggggcacgaaaaatcaaaagcgtgaggcgttaattcggcttatgcttctcgcctgtactgctatccggtacactgcatactgtcatttacattcatgctgaaggatatcctcatgtaccaggatcttattcgtaacgaactgaacgaagcggcggaaacgctggctaattttttaaaagatgacgccaatattcacgccattcagcgcgcggcggtcctgttggctgacagttttaaagcgggtggtaaggtactttcctgcggtaacggcggctcccattgcgatgcgatgcactttgctgaagagctgacaggtcgttatcgtgaaaatcgtccgggctacccggcaattgcgatttctgatgttagccatatatcctgcgtcagtaatgattttggctatgactatattttctctcgttacgttgaggcggtagggcgcgaaggcgatgtcctgttagggatctcgacgtcgggtaactctggtaacgtgattaaagcgattgccgcggcccgtgaaaaaggcatgaaagtgattacgttgaccggcaaagacggcggcaaaatggcgggaacggcggatattgaaattcgcgtaccgcacttcggttatgccgatcgtattcaggaaattcatatcaaagtaattcatattttgattcagttgatcgaaaaagagatggttaaataactatacccgtcatacttcaagctgcaggtgcgttggttgcgctcagaaaccccagtcacagagttatctatgttcctggggatttcctcccttaccgccttcctgcaactcgaattatttagggtatagcatattgttttcttggatattttgagatttgattggctgtaaaaattacgccttcccgcttaaggcgtttgtggaggtgatatatgtgcgaactgcttgggatgagcgccaatgtgccgacggatatctgctttagcttcaccggactggtgcagcgtggcggcggaaccgggccgcataaagacggctggggaattaccttttacgaaggaaagggctgtcgcacgtttaaagatccgcaaccgagctaccattcgccgattgcgaaactggtacagaattacccgatcaagtcctgctcggttatcgcccatatccgtcaggctaatcgcggtgaagtggcgctggaaaatacacacccttttacccgggaattatggggacgcaactggacttatgctcataacggtcagctcaacggttataagtcgctggaaaccggtaattttcgtccggtgggggaaaccgacagcgaaaaagcgttttgctggctattgcataaattaacgcagcgttatccccgcacgccgggcaacatgacggcggtatttaaatatattgcgacactggcgacggtattacgtgaaaaaggcgtttttaacatgctgctgtcagatgggcgatatgtgatggcgttttgctcaacccatttgcactggatcactcgccgggcgccgtttggcgtagccacgctggtggatcaggatatggaaattgatttcagttcacagaccacgccaaatgacgtggttaccgtgattgctacccagccgctaacggggaatgaaacctggcaaaagattatgccaggcgaatgggcgttattttgcctcggagagcgtataatttgaggccagctgtggctgaacgacttcgtgactcaacggtttgctcacgacgtaacgtccatcaacgatagaaacagtcggcggcttatgcgtctgttcaaaataatcgtagccgggttttagctgcgcccagaaatctttgtaatatgaatatttatgacgctgcatattggcgtcggtcatccggaacggataaatactcacctgcacgctcggctgaccaaagaccagcgcggcggtgacaaactggaaaatctcatcaatgccgctgtcggtcatggcatagcagccgacggaaacacaggcgccgtgaatcatcagatatttaccatcatagccatgcgcgcgatcgtaggcattgggaaaaccaatgttgatggccttataaaaacggctgtctggtttgagttgattacgctgaacgctgtaaaacccttccggacttttaaaatcgccctgacggcgtttcgggcctaacccgccggaatagttgcaaattttgtagctatcaagcaactggtattgctcacccattttgacgtagagatcaagggtgcgctcttctttaaaaatctgaatatagaccggtgagcccattaactgctgcttatactctttactgaccggcgtgacggggctgctgctgctcagcaaaccggcaaatgagacgcacggcatcagaagcatcgcaagaaaaaatgcgattttacgcatactgcttgttccttgataaaacggttacacacgccagaacggcaaaagagtccccaaatcggagtaatctggatttggagcgctcacattagcaccacggcagtttttcgcaagtccccgtgtgtacgtttacaattttcccgccgctttcgtcgtcataccttcgaatatgtcgcatttttaacgcgaatgtctctttgcgcgcaataaaacatactgtacacttaaacagtattgtgggggcgagcgatgcgcaaaatcatacatgttgatatggactgtttttttgccgcggtagagatgcgtgataatccggcgttacgcgatatccccattgccattggcgggagtcgtgagcgaagaggcgttatcagtaccgccaactatcctgcgcgccagtttggcgtacgtagcgcgatgccgaccgccatggcgctaaagctgtgcccccatctcaccttactgcctggccgctttgacgcctataaagaggcttcgcggcatgtacgtgacatcttttcccgctacacttcactgattgaaccgctctcgctggatgaagcctggctggatgtgactgacagcccgcactgttatggttcggcaactctgatcgccagggagattcgtcagactattttcaatgaactgcaactcaccgcctccgccggcgttgcgccagtgaaatttctggcgaagatcgcctccgatctcaataaaccgaacggacaatatgttattacgccagccgatgtacccgactttcttaaaacgttgccgttagccaaaattccaggcgtggggaaagtttccgccgccaaactggaaaatatggggttaagaacctgcggggatattcaacagtgcgatctggcgatgcttctcaaacgctttggtaaatttggccgggtattatgggagcgtagtcagggtattgacgagcgtgatgttaacagcgaaaggctgcgtaaatcggtaggtgttgagcgtactctggcggaggatattcatgaatggtcggactgcgaggccattattgaacatttatatccggaactggagcgtcgtctggctatagtaaagcccgatttactgattgcccgacagggcgttaaattaaaatttaatgattttcagcaaaccactcaggaacatgtctggccgcaattaaataaagaagacttaattaccaccgcccgtaaaacctgggacgagcgtcgcggcgagcgcggcgtacggctggtggggctacacgtaacgctgctcgaccctcaactggaacgacagttggtgttagggttataagtcaggccattaatattttatcactattacgattgcgccatctaaatttcagtattactatacccgcgttttctcattctcaataactgcaaaggaggttcatcatgacactttattctctgaacgcactttgcagacctttccaggattaattttcttttattgccctggattagtctgccatttcctgattttttaattcatatatggaatggtatatgggcaattatattcgtcctttatcagatgtggtattttctatcgcatcagataacctgtggatcgaagattccgcgatccaacaattatatacgacggctaagttaaccggtatgaaacgcgttatcgggatgccagatctgcatccggggcgtggctatcctattggcgcagcctttttctcgcgtggacgcttttatccggcgctggtcggcaacgatatcggctgcggcatggcgttatggcaaacggatattttagggcgtaaatataacgccgataaactggagaagcggctggcgtcgctgactgacgtggcggacgcgcagtggctggaggagaatgtccccgccgcaatgcagcatcattcgtggcgctctgcgctgggttccattggcggcggcaatcattttgccgagctgcagcaggtcgatcgcatcgtcgatgctgattcgttcgctttgtcggggttgcaaaaagcgcagttattactgctggtacacagtggttcacgcggtctggggcaagctatcctgcgtcgtcatgtggaggcgttttcgcataacggtttgccggaagatagcgacgatgcgcgccgctaccttgcagaacatgacgatgcgctggcatttgcccgcagtaatcgcgcgctgattgcccgccggatactgcaacagctcagggctgagggcgaaccgcggctggatgtggcgcataacttcgttgaaccctgtactgtcgcgggtgaggcggggtggctgcaccgtaaaggcgctacgccagatgggcagggactggtgattatccccggctcgcgcggcgattatagctggctggtgaaacccgtcgtcagcgaggagagcctcttctccctggcgcatggcgcaaatggatgcgtaccgagtgtaaagaccggttatcggcaaaatttaccccgcgacagctctgccgtaccgggatgggtagccgggtgatttgccgcgatcgccagctcatttatgaagaagcgccgcaggcgtataaatccatcgatagcgttgtggattgtctggcagacgccggactgattacgccagttgcctgcctgcgtccggtgctgacgctgaaaacctcaggggagaaaagcgcatgatcttactgcaactttcttctgcgcagggaccggacgagtgttgtctggcggtaaaaaaagcgctggattgtctgacgaaagaagctgccagagaaaaggtatcgctgacgcgacttgaaacagagccgggacgattaccagacacgctgcgttccgcgctggtctcgctggacggcgaaaaagctatggctttcagtgaacgttggtgcggcacgttactgtggatttgtaccagcccgtatcgtccgcaccatgggcgaaaaaactggtacgtcggcattgggcgcttttccgccgacgagcacatacagtctgatgagattcgtttcgagactttgcgctcttccggcccgggtgggcagcacgttaataaaaccgactcggcagtgcgggccacgcacctggcgagcgggattagcgtgaaggttcagtcggagcgcagtcaacatgcgaataagcgtctggcccggctgctgattgcctggcggctggaacagcaacggcaaaatgagtgtgcggcattgaagtctgaaaggcgtctgttccatcatcagattgagcgcggcaatccgctgcggatatttaaaggaatggcgtttacgccacaataattcggtgttactggcgctgttatagggctgtctggctattcgcgtgtagccgcagcgctatttcagcgcatccaggagagcttatctggcaatggatacccgatattccatattgatagcccgtccagaaatgggacgggcattttagcgctttcttacttcgcaggaatcgctttcagcaattcggtcagcagagtccagtagtggccgacgctttcgatatgtacctgctcatccggagagtgaggtccggtaatggtaggcccaatagaaaccatgtccatatccggatagggtttcttaaacagaccgcattccaggccggcgtggataatctggatgttcggtgtcttgttgaacagacgctgataggtttcccgcaccaggtgcatcaccggcgagttcgcatcgggctgccagccaggatagctgccttttgcttcggttttcgcgccagccagcttgcccagcgaatccagcatactcaccacataatctttaccgctgtcgataagagagcgaatcaggcagtgaatttcgacattcgcatcggacattgtgaccacgccaacgttcagcgatgtttccactacgcctttcgccacgtctgaattgcggatcacgccgttcggcgttgcgttcagcaggcgcacaaaggtatcgcgtgacggcgcggtcaatgcggctttatcactggcaacctcattgagttgcagcgtcaggtttttctctttttccgccagttcgtttttcagaatatcctggtaagcgttcactaatgttttcagcgcgcctacgttgtctgcggcaacggcgagggtagcgaacgcttcgcgcggaatcgcgttacgcagcgtgccgccgttgaaatcgatcagacgcagatccagttcttctgcgtgcccggccagaaaacgcgccagcaatttgttggcattgccaagaccgaggtgaatttcaccaccggagtggccgcctttcaggcctttcagggttagcttaaagcacgcaaatcctgcgggtacagcttcacgggtcaacggcagattagaggtaaaatcaataccgcctgcgcagcccatatagatctcaccttcttcttcagagtcggtgttgatcaggatgtcggcctgcaaccagccggactggaggccgaacgcgccatccatgcccgcttcttcggtcatggtcagcagcacttccagcgggccatggacgacattatcatcagccagtaccgctaacgcagaagccattccaataccattgtcggcgccgagcgtagtaccgcgcgctttaacccattcgccatcaatataaggctggataggatctgtagtgaagtcgtgaacggtgtcgctatttttttgcggcaccatatccagatgcgcctgtaaaacgaccggcttgcgattttccatacctgcagtggcgggcttacggatcagaatattaccgacctggtcgcgatccacgtaaaggcctttctctttggcccaactcacaatatgttccgcgagttgctcttcgtgataggacgggtgaggaatagaacagattttggcaaaaatatcccacaaaggttgtggtgataactgagacagttcagacacgataagtctccttggcggtggtctgaaaaacgttcttacaggccacagggttagcggaattgataactcttacgagatgcgactgagaataccactttctccgcctgcgggtagtataaagcatacaaaaagaggcgtggattccgctaaacactggtttttagcgcgtcaggtctctataatctcgcgcaactatttccccctcgaacactttttaagccgtagataaacaggctgggacacttcacatgagcgaaaaatacgtcgtcacctgggacatgttgcagattcacgcacgcaaactggcgagccgcctcatgccttcagaacaatggaaaggcattattgccgtaagtcgtggcggccttgtaccgggcgcactactggcgcgtgaattgggcattcgtcatgtcgataccgtatgcatctccagctacgatcacgataaccagcgcgaactgaaagtgctgaaacgtgcagaaggcgacggcgaaggctttatcgtcatcgacgatctggtcgataccggcggcaccgccgtcgcgattcgcgaaatgtaccctaaagcgcatttcgtcacgattttcgctaaaccggcgggccgtccgctggttgatgattatgttattgatattcctcagaacacctggattgagcagccctgggatatgggtgtggtatttgtaccgccgatttcaggtcgttaatcagcagcttttcagagcgcccggcaatgccgggcgctgttttattggttacaataagcctctatgagtatccaaggaggctgcacgaatgacacaggctaacctcagcgaaaccctgttcaaaccccgctttaaacatactgaaacgtctacccttgtccgtcggttcaatcgtgggtcgcagccgcccatgcaatccgcgctggacggtaagaacgtcccgcactggtatcgcatgataaaccgcctgatgtggatttggcgcggcgttgacccacgagaaatccttgatgtgcaggcgcgcattgtgatgagcgacgcagagcgaacggatgatgatttatacgatacggtcatcggttaccgcggcggcaactggatttatgagtgggcaaagcaggcgatggactggcagcagaaagcctgtcaggaacaggacgccatgcgcagcggacgctactggcttcatgcctcaacgctctataacattgccgcctacccgcatttgaagggcgatgagctggcggagcaggcgcaggcgttggcgaatcgcgcctatgaagaggccgcgcagcggttgccaggctcgttacgtgaaatggaatttgccgttcctggcggttcgcctgtcaccgcgtttttacatatgccgaaaggggatggcccgtttccgacggtgctcatgtgcggcggcctggacgccatgcaaaccgactattacaccctgtatgaacgctatttcgcgccgcgcggtatcgcgatgttaacgcttgatatgccttcggttggattttcatcaaagtggaaattaacccaggattccagcttgctccatcagcatgtgttaaaagcgcttcctaatgtcccctgggtggatcatacccgtgttgcggcgtttggtttccgttttggcgccaacgttgcggtgcgtctggcctatctggaagcgccgcgtttgaaagcggtggcttgcctggggccggtggtccatgcgctacttagcgatccgcaacgacagagcacggtgccggagatgtatctggatgtgctggccagccgtctgggtatgcatgatgcttcggatgaggcgctgcgtgtggagctcaatcgctattcgttgaaagtacaggggctactgggcagacgttgtcctacgccaatgctttccggcttctggaaaaacgatcccttcagcccggaagaagagtctcgcttaattacaacatcatcttcagacggtaagctgatagagatcccttttaacccggtgtaccgcaattttgaccgcgcgctgcaagaaattaccgactggattaatcatagattgtgttaatagattgataaattctattgatttggtaaaacagttgcttcattaaaggagatcgcaatgacgttaccgagtggacacccgaaaagtagattgatcaagaaatttaccgcgcttggcccctatatccgggaagggcagtgcgaagacaatcgtttttttttcgattgcctggcagtttgcgtcaacgtgaagcccgcgccagagaagcgtgaattttggggctggtggatggagctggaagcacaagagaaacgcttcacttatcgttatcagtttggtttgtttgataaagagggcaactggaccgtagtgccgattaacgaaaccgaagtggtggagcgactggaatacacgctacgcgagtttcatgaaaaactacgcgacctgctgatttctatggagctggcgctggagccgtctgacgatttcaacgacgagccggtaaaactgtcggcataaccctgctgccatgcctgatggcgcagcgccatcaggcacaatgcgacttatcagaactggtaggtcaaccctattgccacaatatcatcgtcattaatgcctaacgtgttatcgctatcaagctgattgattttgtaatctacaaacgcggacatatttttgttgaagtaataggttgcgccaacgtcaatgtaattcaccaaatcctcactgccgacgccctcaatatctttgccttttgacagcacatagcctaatgacggacgcagaccaaaatcaaactgatactggataaccgcttcgaagttttgggttttattggcaaatccgccggaaactggcgtcatgttgcgggtttctgaatagaaggtcgcaatataaatatcattagcgtcatacttaacacccgtagcccaggcttcggctttatcgcccgtaccgcggcgctgcagattttgctccctggtgcgatcggagagagtataagcgccgctgacggcaaaatcgctgccgccgaaatcatagctcacggatgtgccgaagccgtcgccgttttgctttttcacatcgcgatcttcgtttttcccctgatactgtaaggtaagatccagtccatcaacgatgccgaagaaatcggtattgcggtaagtcgccagcccgctggcgcgtttagtcataaaattatcggtctgggcggaagagtcgccgccgaattcgggaaacatatccgtccaggcctcaacatcgtacagcgcgcccaggttacgtccatagtcaaaagaaccgatatcttttaatttcaggccagcaaaggccaggcgggttttttgctgggacgaatcactttcggctttattactggcaaactcagcttcccagcgcccgtagccggtcaattgatcgttaatttgcgtttcgcctttaaaaccaaaacgaacgtagctttgatcgccatctttgctgtcataatcgctcatatagtgcatggctttaacttttccatacacatcaagcttattaccgtttttattgtaaacctcggcggcgtgaacagatgctgatgcgatgatactcaccactattgccagagtgcttttattcatttccattcctgttttaattacgcgctatgatttgtcgggaaacccggtaaaaaacaggaaggtttttaacgttcggtaatgaaagatttatgacaaagtgagaatttttttaaaaaaatatgtttaattgttgcggtaataaaatggtcaaattccgccgctacgcttgctgatcctgcgcaacaaaatttcacgctacgcgtacaggttgttggcaaccggagccagtcctgctaaaacgttcatttggtctttatttcttattttgaacggcagagaatcatgagtgacagccagacgctggtcgtaaaactcggcaccagcgtgctaacaggcggatcgcgccgcctgaaccgtgcccatatcgtagaacttgtccgccagtgcgcgcagttacacgccgcgggacatcgtattgttattgttacctctggcgcgattgccgccggacgtgaacatctcggctacccggaactgccggcaacaattgcctctaaacagcttctggcggcggtagggcaaagccgcttgattcaactgtgggagcagttgttttcaatttacggtatccatatcgggcagatgctgttgacgcgtgcggatatggaagacagagagcgctttctgaacgcccgcgatacgctacgtgcattactggataaccatattgtgccggttatcaatgaaaatgatgccgttgcgacagcggaaattaaagtgggcgacaacgataacctctccgcgctggcggcgatcctggcaggcgcggataaactgctgctgctgaccgatcagcaaggattatttaccgccgatccgcgtagcaatccgcaggcggagcttatcaaagatgtgtatggcgttgacgatgcgctgcgctctatcgcgggagacagcgtttccgggctgggaaccggtggtatgagcactaagcttcaggcggcagacgtggcctgtcgcgcgggtattgatacgattattgcctcaggcagtaaaccgggcgtgatcggcgatgtgatggaggggatttccgtcggcacccgttttcatgcgcaagcctcgccgctggaaaaccgcaaacgttggatcttcggcgcgccgccggcaggtgaaattacggttgatgaaggcgcgaccgcggcaatgctggaacgtggcagttcacttctgccaaaaggcatcaaaagcgtgacgggcaatttctcgcggggggaggtcatcagaatttgtaacctgcaagggcgtgatattgctcatggcgtcagccgttataacagtgatgctctgcggcggatagccggtcaccactctcaacaaatcgatgcgattctgggctatgaatatggcccggtcgctgttcatcgtgatgacatgattactcgataaggaacaggcatatgctggaacaaatgggcattgctgctaaagcggcgtcgtataagctggcgctgctctccagcggcgaaaaaaatcgcgtgctggaaaaaatagccgatgaactggaagcgcaaatggaaagtatcctcagcgcgaacgtacaagatgttgagcaggcgcgagccaatggcctgagcgaagcgatgctggaccgcctggcgctgacccctgcgcgtctgaaagcgattgctgacgatgtgcgccaggtctgtaatctcgccgacccggtcgggcaggtgatcgacggcggtctgctggacagcgggctacgtctggagcgccgccgcgtgccgttgggcgtggttggcgttatctatgaggcgcgtccgaatgttaccgttgatgtggcttctttgtgtctgaaaaccggtaatgcggtgattctacgcggtgggaaggagacgtatcgcacgaatgccgcaaccgttcgtgtcattcagaaggcgctgaaagcttgcggtttaccggaggcggcggttcaggcgattgataatccggaccgttcgctggtcaatgaaatgctgcgtatggataagtacatcgatatgctgatcccgcgcggcggcgcaggcttgcataaactgtgccgcgagcaatccaccattccggtgattaccggcgggattggcgtgtgccatatttttgttgatagcagcgcagacatcgccccggcgctgaagattattgttaacgccaaaacccagcgcccgagcacctgtaacacggtggaaaccttgctggtgcatcaggacatcgcagaacgctttttgcctgcgctgagcaagcagatggcggagagcggcgtaacgttgcatggggatgaaaccgtcatgcaggtactgcatggccctgccaaactggtgccgctgaaaccggaagagctggataacgagtttctgtctctggatctgaacgttgtggtggtcgaaaatatggatggcgctatcgcccacattcgcgaacatggtactcagcactccgatgcgattttaacgtgcgatatgcataatgctgcgcgtttcgtgaacgaagtggattccgctgcggtttatgtcaacgcctctacccgttttaccgacggcgggcagtttgggcttggcgcagaagtggcggtcagcacgcagaaattacatgcccgcggtccgatggggcttgaagcgcttaccacctataagtggatcggctttggcgatggtacgattcgtgcgtaattaatgacgagcggtgcaaaaatagccggttgagtagcaaggctattgacgcaccgcccggttagttttaaccttctaccccgtgattcacccgcgtgaacacacccttctcagggccgatatagctcagttggtagagcagcgcattcgtaatgcgaaggtcgtaggttcgactcctattatcggcaccatctaaatcaatcacttatgtacaacctcatttctcaaaaacaccattttttgctctcgggtacactctcgggtacacaactagcaaaacataagcagtatcccacctaacccaaagatgatttcttgtttaccatgcgccatgagttggcctaccatttgataggctgaatacgtattggaaagattctacattccatcatgttaatgattccgtctcagagctatgtactctgatcctacccgcgtaatatgggcacaaccctaagcgaggttctggttttcaaattgttccggactgagaccgccacaggcactgtgacgacgctaccgattgtaatcacactcactataattaaacactgctgtccgcattatttcccggctgacaaagtcctctccgtggatacattccaccttcagcgtatggaagaagctttccgcacaggcattgtcgtaacaacaacctctggcgctcatacttccccgcagattatggcgtttcagtaagctctgataatccgttgaacagtactgaccgcctctgtctgtatgcacgatgacattttccggacatttacgccgccacagcgccatctgtaacgcatcgcaggcaagctgtgctgtcatccgcgaagacatcgaccagccaatgactgaccgcgaccacagatcgataaccacggccagataaagccagccttcaccagtgcgaagatacgtgatgtcacccacccacttctgattcgggccgctggcgtaaaagtcctgcttcagcagattctctgagactggcagaccatgtttgcggtaactgaccggacggaaccggcgcgaggctttcgcccgcagcccctgccgacgcaggctggccgccacggttttcacgttgaactggtaaccctgagcacgaagctcatccgtcaggcgtggcgcaccatagcgttgttttgcgtcactgaatgcttcccggaagacgttatcacagacaaggtggaaccgctgacgccggtttatctgatgacgacgctgatgccagacgtaccgcttacagatgcaggctatcgccagcgagctaagcgcccggttaaataccccagttgaagtcggtggtgtggaagccaacatggctgtggctggcgcgttaacgacgcctggatgcgacgctccgctggcgatcctcgatttaggcgcaggatccaccgatgccgccattatcaataacgatggcgtagtgaaggcggtacaccttgccggggcggggaatatggtcagcctgttgattcaaacggagcttggcttaagcgatccgtttttggcagaggaaatacccgctggccaaagtggagagcctgttcagcattcgccacgagaacggcgcggtggagttttttcgtgaaccgcttagcccgtcagtatttgccaaagtggtgtatctgaaagagggcgagctgatcccggtcgataaccagacctcgctggagaagattcgtctggtgcgccgtcaggccaaagagaaagtctttgtgaccaactgtctgcgcgcgttacgtcaggtctcgcccggcggctcgattcgcgatatcacttttgtggtgctggtaggtggctcatcgctggattttgaaattccgcagatgatcaccgatgcgctggcgcagtacggcgttgtcgccgggcagggtaatatctgtggtactgaaggcccgcgcaatgcggtagcgaccgggctggttttagccggagaagccaaaaaatagtgcagaaaacagccgcgcaagcgtttagctgcggggtaagtcaaagaaaggcgatgttctctttgatatcccggcggagttgggtacatagtatcaaggtgtctctcacgtggttaattttaaggataagagcatgccaacagcaattgagaaagccttggattttattggtggtatgaacacatcggcgtcagtaccccattcaatggatgaaagtaccgctaagggaattttaaagtatttgcatgatttaggcgtgccagtaagcccggaagttgtggtggcacgaggtgagcaggagggatggaatcctgagttcacgaaaaaagtggccggatgggcagaaaaagtcgcctccggtaaccgcatccttatcaaaaacccagagtatttttcgacctatatgcaggagcagctcaaagaactcgtgtgagctgactatcgaataaaacgctaacggacgtttccatctaaggatggcggcgtccagaagggttgccagtgacagttttggactgccgattcatttcttttcgtcaaattaatgtctatatatttattgaataaatatatagttcataacttactacgttgccattaccgcgtcattcttagatgatctacatttcataaaacacttgattccatttcgtctctattaagaaaaataaaatgtgaacgctgtcaattctgtaaacgtaaaagataaatattgtatacacggatgtttgttggcaaacaggcagatggcaatcaggatcttttacggaacattgtgtatgaaaaataatattgaagagacaataggtaagtacttgcctattttaatgatattacctctggcgggtttggcagagttagcttctttatattcaatccaggctttattaccaaagttaagtgaggtttataatatcccattgaatcaggtagggatgattttatctgctgaggtggggtttctggcattagccatgttatttagcggcacgttatctgaccgttttgggcgaaagccaatcattttttattcgttgctggcaggaggtattttaactctattgtgcgcaactgcatcatcatggccgatgctggtggtataccgcgctttgctcggcattgcagtaagtggtattacggcggccgttacagtctatatcagtgaagaagtctctcctgctttggcagggattgttactggatattttatttttggcaattcgctagggagtatgtctggtcgtgtgtttgcaactttgatgatggagcatgtatctatagatacgattttctttatcttcggtggtgttctgattgctatggcactcgcggtgaagttgtttctcccgacatcccgacagtttgttcctacaccttcactacagcttggtgcagtgttgaaaggcgggttggaacattttaagaatatccgcgtatcattatgttttgtcattggatttattcttttcggctcttttacatccatctttaattttctggcgttttacctgcatcgaccgccttatgagctgagctacacctggataggtttgattccagttagcttctcattaactttttttcttgcgccatatgctgcccgtgtcgcgttgaatattgggtcgatgaatgcgctcagtatgctgatcatctgtatgatggtcggtgcatttcttacgctaatcgccccttctctgtgggttttcatttcaggtatcgttttactgtcagtcgcatttttctctgctcattccaccgtattagcctgggtcagttcacggagtccaaacgcaaaaggacaggcgacatcgttttatctgctttgctactactctggcggtgcagtaatggggtatttaaacgggtatcttttctcctggcagggatggaatgctattgcggcatcatgtctgatgatgctggggataggattatttatctgccggtttattttcgcaaaatatgagaaacaaccgcaaatcaaaaaacagtcagttcaggagagtttctgattatagacacgaagtgtgtttttatactttccataatggaatcatcattttttcattaatgtgtcactatagctaaaagcttaaattgtgaatatttggctacccggatattcgttgctccaggaatatatatgtctgctaaaacgctgtatgaaaaattagttgagtcacataccattcgtgaacttgataacgaaggacatgttttactttatattgatcgttcaatactgaatgaatataccagcccgcaggcatttagcgggttaagagaacgcggccgcaccgttcggcaccccgacacgtttttattgaatattgaccatgttaatcctacgcggtcgcaacgggatgacttaatgaccgatccgggaggacagctacaggttgattactttcgggaaaatgccgctgactttggcatcacattatttgatgtgctggatccgcgtcaggggattgaacacgtggttgctcatgaacaagggctagtgatgcctggcatggtgatcgccgccggggatagtcacacgacaacctacggtgcatttggcgcgctgggctttggtatcgggacgtcggaaattgaacatctgctggccacgcagacgctggtttaccgcaagctcaaaaccatgcgcgtaagtgttcagggagagctacctttcgcctgttccgcaaaagatattgttcttgaattgcttgaacgtattggcgctgatggcgcgacgggatatgccattgaatttgtgggtgaggccatcagcgcgttgagcgttgaaggacgaatgacgctctgcaacatggcggtagaagcgggggcgcgtggtgccattattgcgccggataaaaaggtttttgactatatctacggtaaaccgcaaatgcctgtaggtgaactctggcagcaggcattgctggaatggtcacagttgagcagcgatgctgatgcggtatttgataagacggtggcgatcaactgccatgatcttgagcctaaagtcacctggggaatcagtccggatcaaacaggttccatcaccggacgtgttcctttcccggaacaggaaaccaatccgcttaagcgcctggcgcttgagaaggcccttcattacatgggattaacggctggcatgttgctgaaagatattcgtatctctcacgcttttattggttcatgcacaaatggtcgcattgaggatttgcgtgccgttgcgaaggtgcttgaagggcgcaaaatcgccagccatgttcgcgggatcattgtgcctggttcaacaatggtaagacgccaggcggaagaagaaggactggcgaaaatctttattgctgccggttttgaatggcggcagtcgggttgctcaatgtgccttgcgatgaatgaagatgtattgtcgcccggcgatcgctgtgcatcaggtacgaaccgtaacttccctggacgacagggcgctggagcaagaacgcatttgatgagcccggcgatggttgcggcggcggcggtagcggggcatctggtcgatgttcggtcattacttcaggcaggggaataagatggatacgtttaagcaaatcagcgggcgaattgcgccgatgctggaaccgaatatcgacactgatgtgattatgccaaaacagttcctgaaagggatcgatcgccaggggctggataaaggggtgtttttcgatcgtcgctttatggctggcggccaaccaaatcctgattttattctgaacatgccgggctggcagagcgcgacattcctgctggttggccccaattttggctgtggatcgagtcgtgaacacgccgtatggggattaaaacaactgggagtacgggggctgataggtagcacatttgcaggcattttcgatgataactgccaacgcaacgggatcctcacggtctcattagatgaacctgctttggcgcgcctggcgcagcttgccgcgagtgctgataccaattctatcactgtttcactcgatcgctgcgaaattacgacggcagaggaaacgatctcctttgtgatcagtgaactcaaacgggcgatgctggccgcaggcgaagatgcgatagcctggacattgcaatacttgccggagattgaaaattttgaggttgcgcattattcacggcggccgtggctaaaacgccctgcatccccgcgcggttaaggaagaagactgcaatgaaactggttcaatatcttgtgaacggtggcaaacgctacggcattatgcaggaaaccggaataattgatctctcgcagcggcttggcgacaaatatcccactttgaaatctctcctgtgcgctaatgcgctgacggatgcggcgttatggtgtgatgagccggcggattattactaccaggaagtcacttttctgccggtgattgacgatccgcagaagatcatctgtgtcggaatgaattatgccgataagcgtattgagtttaatgaaaccaacccggccccaaccctttttgtccgctttgcggattctcagaccgggcataatggcctgctgctgaagcctgaaaataccaatgagttcgactacgaaggtgaattagccgtagtgattgggcggcgatgctcccgggtcagcgctgaggatgctttagattatgtcgccggatacagctgctatatggatggttcagtgagggactggcagcatagctggtttacggctggaaaaaactggccttcgacaggatcattcggtccgtgtctggtgaccacagacgacattcccgatccccagatgctacgtttactgacacgactaaacgggcgggaggtgcagaacgaatctacggcaaatatgatccatcctatcgcttcactcattgcttatataagcacatttactctgctttcccctggcgacacgatcctcacagggtcgcctggtggagtgggcaaaaaacgcgttccaccgctgtttttacacgatggtgatgttattgaagttgagattgaacatattggaaccctgcgcaatgtcgtccgggatagccgttatttaacatcctctgttagctggcatgacgggagaaagtgatgagtacactgattgaatgcggcgcctctccgtttattccggggtttgcgctcaaggatgttcgtctggaaaatggtctgacggtaagagtggctatcggaggcagcggttcacctttggtactgctacatgggcatccgcagaatcatacaacatggcggaaagtcgcaccgacattggcgcaaaatcatacagtcattttgccggatttgcgtggctatggcgacagcgataaaccaacgagcgatccggcgcaccgtacctattcaaagcgcaccatggcgcaggatatcgtcatgttaatggatgcgctcggcttttcccgttttgcctttgtagggcatgatcgtggcggacgcgtaggacacaggctcgcgctggattatccggatcgtgtgacctgttgtacttttatcgacattgctccaaccgcgacgatgtacgccttgaccgataaatcctttgctacgcgttacttttggtggtttttcctgattcaacctttcccgttacccgaaacgatgattgcgcacgatccggcattttttctgcgtaagcatatttctggccagctaaaaatagagggcgcgacctcgcaggaagcattcaatgaatacctgcgctgttaccagaaccctgagatgatccacgcgatctgtgaggactaccgggctgctgcgacgattgatttggacgatgatgccgcagatacgtcggcgcgtatccggtgtccgttacagttgctgtggggagggctgggaacggtagggcaactatataatgtggttggtacctggaaagaaaaggcgctaaacgttcagggggaagcattgccttgcggacactccccgcaggaagagtgtcctgagtactttatccagaaacttcagtcctttttacattcagtgttataactcggtcatcctttgcaacttcgcactgatgctatgaaaacgacacctgtaggaaaaaaacatcgccagccccttgagggctggccttctgttgaagatcttttcgtttttgtcaccgttgctcgcaacggtggatttgcccgggcagcgctggagctggggttatctccctcctatatcagcaaacgtatcgctatccttgaaaaatgtctcaacgcccggcttttttttcgaaataacagagtgatgcgtctcacaccggaaggcgaaaatgcgctgggtggggctatgcaggtcgtcagtgaaatggatggctttgtcagtcgtttggataatcaacgtggtgtgttggctggtaatatcaccatcaactgctcatttggttttgggcataaatatgtcgcagaggcgctgtcgtcatttatgatcgcctatcctgatattacggtaaaactcacgctaacggatcgtgaagtggatctggtggaagaggggatcgatattgaaattcgcgttggggatgatatcaacgaattgtatatcgcacggcagttagccactaatcgacggatcctgtgtgcttcccctgaatacctcgaacgccacggcaagccagagtctgttagtgcgcttgtgcagcacgattgcctaatgattcaggaaaaaaactcggcatttggcaattggatattaacggacggtaagcagcagacacattgccgactaaacggttttcattcttccaacagcggcagtgtggtgcttatttgggccctgaaaggccatggcattacattgcggtcggaatgggatgttgcgcagtatattgaacgaggtgagctggttcgcgtgttgcctcagtggtatcaggaagcgaatatctgggctgtatatacccggcgttcatcaagttctgatcgtatcaaaatctgcatcgatttcctcacggagcatcttgcacaatgcttgccaggcggtaaagcaccgggcgtactgtgatcagtcggcgccaactgtcgtggcgccagatgctctgacttacgtttactgttaggtgttctttttgccagcacccagtagcttttagggcgttgcgttggtggcgcggttttgtttccgctatcgtggcgaagttatcttttatcccaccacgaggcccaacctccacatagatacctccattattaccggatttctcacctggttttaacgtcatattttatctcctgatttttgggtgacgattatcggaggttgagaattctattggtatcggctggatggcattgtaagtatcacacactcactccataacaatcagattgattgagcgactactttagctcaatagatatgtgttcatcttaagcgtattatcgcaggttggtaattaaaattctttaaaaaacaataccatccatcaattcaatatgctgatttttcgaggttttctcaaatttagttatgcttatgtaatgctacctaactgactaaaagtaatgctcttttcacacaaaagccttaacagaggaaacgcaatattacgtgacttaatgcctctgctcattctcattagttataccaatgtaatgttttctcacagcaaaagagaagtagctacctgtgcagcattataggcggaaaatccattgggggtattaccaaagatgaaatagaaaattaatattattaattaaatgaatatgaaacaggtattgttcctgttatcgttacaaccttttctgtcataacaatcttctcattttctttctcgcatacttgctgagcatggtataaatgtctatgaggacgtcagctcggaaagcattcgttctgcatggtatgcctttcgctattctcaggggcgtgaaatgaaagttttctttgatggagtctatataactatatgaaattgataataatcctccttctcgcgctattcccgttatgttcatctgccagcaatcattatgcccttgtttttgaaaataacacgatactgcttgttttaaatcttaaatgttctccctgtgatttaaactgcgcaaatattcaataccagattttcaataaagagacggagtctgttatttcaggggttgctaagcctgtgacaacgggcatcgaaaataattttcgtggttatatgatgcgtaataataatacgttctacacattaattgaatcagataatgaaaacgtatgggatatgtctgttgaggagaagggaactcaacagaacaaagatgccgtgcaaaaagtaaaatatcagcttaatgctatttttgacaatggtacatgctgagtctggcttgcctcagggatacgatcgtatccctgaatatttcccatcaaaactcaggagtaaaatcattctcactaatatatttttccagtatggcggtatattgtcgccagttcccggagtcattgattactgcataatttatcgatgctcccggcgttggcgagcgtgttagcggcacatcacgtgctgttttcggcgcaaccatgatatcgccgatactttttttgtcatccgtcgttagtgttaaactcatataccacgaggtggggttaactatccgtatagtattctctttagcaataaagcgtaattttttctcctccgcttccgtgggcgcttttagcccagtcgggcgaattaaaatttttagcctcaaacgaagcggtaacaccagttttcgcgggtggtttttaatgtcctgggtgactggcggtatctgataaatgtttagccagaagagactctcccggtccgttgccagctgctggcgggaactcaggagcaggcgaagcgttctcagttctcctggctgcattttaaataccggcggcagcgccaccagcggcgttttgctgttatccggagaggcgtcaatgtttccggcgtcggtccatacctgtaacagcatcggcgttgtattatcgttggataatgtcaacgattgagcgacctcatctgaagcaaaaataattcgggttctgtcaatattaacggcagcttgtgccgggccataccatcccgtcaacccaagtagcgttaatatgactttactgaaaactaaccactgcctgtaattgcgcattcacgcttcctgccgttactgtttgtccgccgatcgcctcaagcgaggcagtaaaatcaccgctgtaggtttctactgaaccggatgatacccgtgtggttaaatctttatagccataccagcctcgggcgttgccagtgcctgtcttgatccgatcgggtaacaggttaattggcgtaccggcatcgttatagatgcggatacccactccggaagctacgccaggttcgccataatgggtgtccagtagccacgacagaccgcctgcggatgtggttagccccaagcgacgcgccgccgccacggcggtgggttgattaacgacaaaccccattgcgacattagcggcgctggtggacgggagggcactggacacggcaccggactcacattccaggctgacgtggaaaggcgcctggctattgcctccggcggctaatatgccgacggcgacagggggaattttcacgatcgcaggataatctgtgattttacataacgcgccgcgaacataggtgacgctattatatgtactccatgccccgggccaatagctgggccagccataataatcgctggcatgatccagtcccgctttgatccgctcggtaatcaagcctgggcctttaaacgcgatataaccccgaggctgcgtccaggtatctcggtccattggattctggtaggcaaaatattttcttgagtcaattttaaacatctcatatagcacgttgctaaacgcgctggcaggaatataaatatatttgtcatcctgaaaccaactgtctgcggtaagttggcgttctttccagaaacggctgtaatattcgccggtactgaggtttgtcatacggacagcaacattacgctccacatcataataggcgccttctacttcgggagtaaaaaatgcccccgcaaaagcgctatcgccatttgtcgaatacatctcatagagcttcccggcatcggcagtatcgcagcggtaaagtacctgtttactggaatagggcgtgccggtggcggccgtcaggaagttaccgatcccactggccaatagcgtgccggagggttgaaatgtttcactattactgacgctaatcaccgttggcaaaccgatattaccggtatttgtgtcagttgcgccgatccagttttgcgccgtgtagcccgcttttatcgccgcgtcagagagcgcgctcttatcggtgactttgatacatgacgaccatgttccggcgctgacaaacaggctggtgataaacaatagcgttcggaaactaaaaagcattgtgctattccttctcgcagattttgttcagatagagaaacggttctttggtgtgaagatcgagttggtaggcaacccggcaacgctggtttgcccctgttccccagcgcaccagtagagaacccgacggatgggcgatacgggcataaatctgcccactctggccgaccatgccgatgtttgtgccttcaccgttgaaaacatcagcgcccattggcggtatgccgccatccggcatcttcacggagatcagcactgctttgccgctgatagtggcgaaattgacacgcgcgatggcgccagcatacggcacaatctgctgacttcctcccgtcagttcggcatcgctgcgcatcttacgggtatcgagcgtaacgttattgacgcggtaaggagataacgaaggcagaatggcgtaaccaaagcgatcaaccacagcgccctggccattttgtacgatcgcgccctgcgcgccatcggcatgaataagcgcaaaggtatcgctggtataggggccagccgtcagaccgccagggtgaagaaccagggtgccggacgcgcccagcccttcctgacgatagttatcaccctggtcatagttggcgcgaagtgcgccaaaccgggtgttttgttgtagattaccgccaaacgtcgttggcgcgctgctatcactatcactattgctattgcgataacgctcgtagccgccataaaccgaccatgacaggtcgctgttttcaccgctactgccggtcatggatacggttgaggaacgactttgactggactggttataattcatggcgacagacgttctgttttcgccccaatccagcggtatagagacattaaacgacattgtggtttcggtatatttttgtcggctactcacgtccagtggttcgttaacgccgtgataaaagcgatcgtaatcccaggtggtgcgctgtcgtgcgatattcaccccgtagcttatattccgccactggttgctatatcccatttgtagctgtgttatacgcgattggttattgtagtagtctgcggtgctggcgctgaggttaagcgtgccaagccgtcctaacggctggcttaccgtcgcggacaggcgattgcgctgatgcagcgtgtcggagtagtaatcaatccccgtttttgcttcccggcgtacgccgagcacgtcctgaagatcgcgaaagccgttggttgaataacgataagccgccagtaccaggttagtgccggtggtaaacgttttgctgtaactgagttccgcgcgccagccttgttggcgatcgttatgctctgcgcgcgcattcgaccaggtggcgttaaggccgaacgcgcccataccggtggcccagacgccgcccgccagccatgcctggtaacgctgcgcaattcgtgaaccgaggttgagggtaatggtgttattaacgccgtgctggaacgttccctcaaagaaacgattttcaatatcgtagtactgacgaaccctgccgaaggccagcgaatagtgccagttaccggggcgaaccgaatccggcacggaagaataaggcacggtgaaacgtgaggttttaccgctggcctcgataacctctacctccagatcgccttgataacgggtgttgtacagatcgtcaatataaaatgggcccggcggaacgttggtttcataaatcactttccccagttgttttactaccacgtgcgcgctactggccgctacgccccgaacttccggcgcataaccgcgtttgccctgcgggcgcatccgctcgtcggtgacaagtttagccccgttaaaagacagactgccgaataagctggagtccgtatagctatcgcccagcgacagaatactgttaacagacgcgacaggtctttgcacccaggttcgaacgctattatagcgccaggcgcttccgctctggttgctattggcatagcgcagattactttgatgacggacctgccaaagtccgaggttaacgcccatgtttaaaccgctccataagtattggtagcgataatggctgtcggtattttcggtgtgggtccagtttgtgttatggcgtaaaaacagcgccagcgcgccgctatcccactctgaaggagagatataaccgcgcggtttgtgcgtaagttcggtcattggaatcgtcagcaacaggcgaagcgtggcgctatcaaattgccaaccggcatgaggcacccactccctgagcgggcgacactcggtcgcagcgtcggtcgcggggagtgattttatctgtgccgctttcatcaccgataagggcaggcagggttcagtctgttgaccctcttttacagcattaaatcgaatattagtgctcgaggttaccagcgtgccattaacgtaaacgtcggcaagatagtctccggaaggcgtttgccgttcattaaaacgggcaatattttgtccgtaagtggccccctgaagtagcgcaggatcaaaataatactcttcactttgcgcggagcctgagcaaactatggcgatcaatagcgcaaggcttttgcggttcaaattaatggtgggggacatcgtagctctcgcttatccttgcgcccaggtcgttaaccaaagtaacggtgactgtaccggagaaggatttgagtgaccgtttgcccggcagccaccaggtttgactggagaaaggggcaatcatgtcagcatccaggttatacgaagcgccgttcacttttacattcaggttacttaaagaggcaaaccagggctgcggattaacaataacaataccgctttttccggaacccttatttaccgttttaatctgtagttttttcgccagattatcaggtttacctagcccgtcaggacgatagaaaagttttattcttgagcgcagcatcaccaacattttattttgcccgctgtcgctgccaatattcgttggtggtacctgtaatacgttaaaccagaatactgactcacgatcctgcggcaattttttcgtgttgttataaattacgcgtacaacctggcctgctttgggttgaatacgaaataccggcggcgtggcaatcaatggcatcgcgctgctattttccgggctggtattcatatcgccatcgtcaaaccaggtttgtacgatataaggtattgcatcattattttttaactgcacatctacggaggaggctgttgatgggtaaattattcggctacccaaaatagtaacgctcgcccacgatgctgtggcgggtagggccaggaatagaaaaactattaagtaatataatgcggaatgtcgggtatccattttcatctcaacaactccctagcgattgaaaatggtctggcgtttcaacgccagaccgtagcgacaattatttatacgaaacggcgtattgaagggtggcagcgactgtcccagcctctgctttcccggtagagtaataccgcgcggtataagtcgcgctcgcttcagaagcatttggttccagctgtaggtcgccgtcgccagtaaagccgccggtcagattgattggctcccctgaagtgtcgagtaattggacttcaacatttttcgcgctgccagtattacccaggttaccgttactggtgacctgattaccgacaaagacagtggaaatttttgttgttttgtcctgagagccggtacacccggacagcccaatatcaaacgttattggccccgcggttttcccttgttctgataaatctttagtacttactgttggtaataacacgacgggtttagcctgattaccattaataacgacagagcatgtttcatcagagacttccccttgaaaggtgatggtgttatcagaaacagccatcgcgctgctggagacaagaagtgagcctgtgatcattgctaaatattttttcatagacatatgataatgttcctgtattaatctttactttttcaggacgagtgcaattcgcccgaatgtttcgtgcttatggaggagtggtaaaaataacgatcattaactctatttttggatgtgagctataccctcctgactattgataatgcgatataaaacaaacagacttatttctcttatcatgaaatagagcgataagcgctttcgtccatacatctcattagtacaactgatagtgttatcatttgattgagtgtaatccgataacaattctctccgcatctgaatagatagactatgttgcaatacaaacctgcacatttttgctatgtaaaatccgtatcagttaaacctcccgatggataatacgatggtgagattaaggtaaattttctgaaatgtgcttctgaaacagtataattagtcttacttttttcttacttttggcctttcagaagtttcctgagtttgcgttaaggtaaagaaaagtgttcagatttacctataactgtttgatttgtaatgtgtaggtaatacttgtgtcaattattgtttactataagtgagacttataagttaaactcaggttaattagggggctgaattcttttttgagcatgataatatgtcgtctgaatgatggatgcagttacctttaggattgtcatgaatgaaactatatttttacttgataagcgtgttgtatttgatagtacgaagatgaccttatcgcatggtaatgagataatcagaatatcagaagctgagacccatctgcttcttgctttttggcatggtctttacaaaaaagaagatattattcattttgtttgggaaaatcgtggaggctgcgtctcagaatcaagttactataaactcattaatcaaatgagaaatgattttagtagcattggtctacagtcatctgacatcgtaactcgccctcgggtgggggtatcgctgtctgttgccattgaacctataaaaaaaatcacctccctaaaggtgagtgatgaaaacgttaaaggcaccacgactcgggagaacatattttacaaaaataaacgtcacagcgtatttgtggtattaacaggagccattcttctggcattgctctatggtgtatttactatatataaagcgcctgttcgtaacagccctgatagtttttttacatatcttggcgaatataacgattatgcaatctataaaacaaaagaggataaggtcacattaagtgaagtagtttttgcttttaactctctaaaaattaaaatttaccggcaaaatggacgccatctttattatatcagggagcctaatatgaatatttttctgcaatgcttaaatcctgttgaaatggcggtgccaaaatgtattacagtaaaagaacgttactgattatatttgtaatatttatcgccattgtcgcaatcggatcgataatagcgcttgagtgggtaaatcgtgactcttatagaaccaataatcttatatgcacgacaaaatcagaagcgtatattgcgccacgaaaattgtacatggatggtggacttgtgctggatcttaaatccggcaggattaccctacactacgatgttactaccgatacgaaagagaaacggcttttttttcgtgatatctgcatcagcaaactgcgcagaacgggtatgaaaacatttacttttaaagtcaattcagttaagacttttgagtctgatactgctggcgatttgttttcctggttgagactgttacagcctggtacgattaatgagttaaagatggtcaaaattgggaaaaatacctacatgttttcgcttaatcgacatttgtataatgtgtgtaccaccagtagtaacgttgagttgtagccaataatccctgtattgatgggaattcgttccgtgatttatgcctcatcaggcagcgaacctggtatcaggctaacatattgaatttagatatctgctatcgcttattctaacgatagtatcctgcacctgttgggtattgatattttcttgtctattttcggcacagggagtgccatcttgctatcattaagaacgtataacctatctctcaatattgcttttctatattaatgttactttagttatcctatcaaagcgtacagtggcaaaaggaaggccggtaagagggcaatgatttgaaagtaagaaagctatttctgatgttgtttattgccgttccactgatcgtaatgatattggtggggttactcgcgggtatcttccagctaaaacgagatatcgccgtcagcgccaatacgctgctgcggtttagcgcggatatatccgccgcctcctggcaagtcgccggaaaagccgccagactggctgagagttcctgcactgacacgctgaaagaactgtccagaacgcgggccttcactccttatgtccgtgacattggatttctggaaaatggtgatatcacttgctcctttgtcacaggaaccgaacgctatcatttttcccggctggcagggctttctttacctgcttcttatccggaacggtggttgcgatctatcggtagtatggccgaaggacccgatcgccttgttgtggtgtatgtgaaaaaagtagcagcggataaagcggctttcgtcattgtggattcgcagtatgtccaggagctcatggagatattggctgcagaaagagcatcagcctttagcctgacattcggcgcaggagaggcgattaccagcgctgcgaagttgcgcggtaaggcgtttttaacgcagcggttcacctcaaccgatcacactatccagctgatggtgcgaacccctttctcaacgttatcggcatactggttacaaaacctttttatttttattccgctgtcattgtgtctttctgtagggatgatgttgttctacaggcgctggtatttaaaacgcttatctctggcccgggagattgccaggggaataacgcacaatgaatttacggtacattatcaacctgtttttaatgttaaacacggtagttgcggcggcgtggaggcgctaatgcgctggccgcaaccggatggccgttttataactcccgatatttttattaccgccgcagaaaatgaaggcatgattattccactctctcgtcatctgttcgaactgattgctcatgacgtgataaactggactgtaccggatgatttctatatcagcgtaaatatatcgcctgcgcatcttatggatgacggttttatacaagatatagaggcgctcaggactcgtttgggaacgataacgcttatgttggagctcaccgaacgtagcctgattgtagaaccttcacaggtcgcagaaaaactttcaacgctccgtgaaaaaggcgtgttaatagcgattgatgattttgggaccggctattgctccctctcctatctccagcaattacctgtagactctcttaaaatagacagaacgtttatcgataccattgataccagcagcgatgatgttcctgtcctggatactatcattacgctgagtcagcgactgggactcaatgtggttgccgaaggggtcagtacccagcaccaattgcgttacatcttaagccacggggtaggattcgttcagggatttctttatgccaggccgatggggactaatgactttatgagttggcttggcaagtcagcccagcggcaaaatggtttgctcaagggggaaagcggatccgcgagcgatctggtggctgaataatgcaggaactcgctacggaaaaaaattcaatagcacgatatatcctggtaatatgtttatgccgtgaagaaacgtgatagcactggggcggatatttttatgagtcagaacaattatctgattgacaaaagggttattcttgattgtgaacgaatgacgctttcctgcgccggagagtcgataacgatatctgaatcggaacgcagtttgcttatcgctttttatgaaggcctttttaaaaaagatgatttaattaactatgtctgggggcgcaaaggtgtcgtggtctctgatgccagttattataaattgattaaccagctacgagggtcatttgataaaattggtcttaagggggcgtctgttgtgactcgccctcgcgtgggtgttttactctcagtttccattgaaccgttgagtgatgaggcgcaaaatacgccgttgcctgctgttgctgaaacagaagtatcgacggttgaagtgcggcacgatgacactattattaccccaacaccgggcgctgtgaataaaaaagattggctctacttttgcctggccgcgcttctgatgttttttatgatgtataaagttaagggtgaaaatattgattactttaccctccagggttcgtatgatggatacactttttatagtgtcgggcatgataaaacccatctgacggatatcgttgaagcgtactctgagatgagtaatgaaatacataaacaaaacggaaaaatcatttattacattcgtgtgcctaacacaaatatttttgtccagtgtcttaaccaacttgatatagcggagccgaaatgcatttccataaaagaacgttattaagcgtggcgacgcttggtatgctggctgtttcagtcgtactgatggtagtttgggtacgaaacagtaaccatagttctattaatactaatgaatttttatgtacgacaagaacggtaacgacgatacagcctaaagatatccatgccgatggcagtcttgttcttgattttaagatgaagagaattacgcttcaatatgaaataaaaacaaaagataacggtgtaaaaatattataccgggacgtgtatatgaaaaatttacatcgaacagcgcctggtgtttatacgttcgaagtatcccaggtaaaagtctttgccacggatacggctggcgagctgttatcacatttacgggttttgcatccggaagcggctaatgagattcgaatatctaaagtgggtgagaaaacctttttctattctcttaatcggcagctttataacgtttgtaccgcgcagtagatctgaatgttgtctgaatgcgtcagaaagcgagttgcgaaattgccctccgcaagggtaaaggttaactcgaacaccagttaaagagcattaaaaacaatgagttatgaattttttactcttcatggaggtaactgatactcgctgataacctctcgcagtccgcctgacggatgcgatgccaggatcgggtctgaagcaaccatgaatccgccattaataaaaaagtaagaactctgtaagactgatttcatatccattatcgaatatatcaggttatattacctccgcagttggcatgactggtaataagcgcattaggtgctcttaatctaaatgctatttgtgtgccataagttccggtaccgccttaattatatattaaaaatggagtggttttaatgaaaagacggtcttcgttccttgtttttttaggtttattattagcgtcacctttagctttggctaacgatcagcacaccgtatcgtttggttatgcacaaactcatctcagttcattgaaaaatagcgatagcaaagatctgcgaggctttaattttaaatatcgttacgagttcaatgagacctgggggatgttaggctcattcaccgcgacgcgcaatgaaatggagaactacacctggaaagaggggaaattgcataaaaatggttccgattctgtggactatggttctttgatgtttggaccaacatatcgttttaatgactatgtgagcctgtacggcaatgcgggtatagcgacgatgaaatttaataaacactcaaaagaagactcctttgcctacggcgctggcgtaatatttaatccagttaagagtatatctatcgatgcatcatgggaaaccagtcgtttcttcgctgtggataccaatacatttggtgtcagcgtaggttatcgcttctgatattaaaagtataagcgttacgtttatggcaaggaattaaaaataatatggcgctgctacagaatagggatggttatgagcgctcaggtaatcttaagaggaagataaaacactcaccgtagcgttattctattgatgaaattatgataaattcactatcggaacaacttccgttaaaaacgataggtatagttttaacggatgattattatacttatttaggcatcgcttcactctttgaggatgggaagtgctttatgttcccactcaatggagaatataattcgtgtcagatatcagctagcgaagatatcataattattattgatggacgagttttgattcagggggtctggaaaggttttaaggcgctcatgcagcattatccacatgctcgtcgaatctggctcacgcgcagagatattggaaaactttatccacatggctgcgatagagatcctgatatcgatcccgatttggcaaagcctgtttttattgagcatttcattaaatacgcttgtgcaaacgatgtagcggtcggtgaaattgcgccgttgacaaaaaaggaggaggagttgttatggcactttttatataaaaagtcgatgagtcagatcgccagtagctatggcatgagtcgtaagactttgtacattcatagattgcgtatctgtcgtaaatatggcttcaaacgcttttttcatttgctatttatttaccaaagaagtcgccatatcttcgcatctaaaatttgccgtgtagacaaaaacgccgatcaggcttgaagcaaacaagatgaaaaagttaacgatgagagagtgtgaaagcatcaatcctactatgctgcttgccattaagatacttatctcggcgcttgacgaaaaaacaaaaataagactcagagagcatattgaaaaaactgaacaagaaatagcctcaagcatacatgatagcatcatgacagagacttttcttcagcaaatgaaagacattcgttacatcttaaatatagttccttgacggcgttcagaagcaagaacgcgttattatttaatgattaatagaccaggtattagtatgaaaaagatcttagtatgtttcgtcggcttggctttaaccgcatgtagcgctaattcgttgaattatggcgctgaacaggtacgggtgatgaccagcgagccaggtaaggaatgcagctacttaggggatatcacgggcagccaggggaatttctttaccggtggctggacttccaacagtaacctggaaacgggtgcccgtaacgatctgaaaaacaaagcttataaaatgggcggcaatacggtagtcctgttaacccagcgtgcaggccagacaggaagttcatggcacggttcgggctcaagcaaacaaacgaatgtcacgttaagcgggaacgtttatcgttgccctcgttaaccttattttgcaggtaatatatgcctgtttagcgcgcgcgccgcactggcgacgcgggcgctatttgggctaaccttgctttttctcactgtattcccgccaaccgccgcctaatgctttatacaggttaatgatatttaactgttgcatgagacgtgtgcgtaccaggcgctgttgtgcgccataaagcatacgatgggtatcaagcagcgtaaggtagtcatcgacgccttcctgaaaacggagtccggccagctcataggcgatttgactggcttcaaccgcgcgttgttctgattgcacctggtcattcagcgtacgctgtcccgccagaccatccgccacgtcgcgaaaggcttgctgaataacgttttcatacctggcgatttcaatctgtttttggacatgcgccctatccaggtcagcgcgtaatgcgccgccgtgaaagagaggcaaggtgatttgcggtagaaaacgccagcttcccgatcccggttcaaagagtccgctaagagacgcgctggccgttcccgccgagcctgtcaggctgatggtcgggaagaaggcggcgcgcgctgcgcctatccgggcgtttgcgccgcgcagcctgtactcggcggcgcgaatatccgggcggcgtaccagcagatctgacggtaatccgcctggcagtgtggtcgggatcgcgccttctgtaagcgtgaccgcttcgtttagtcgacgcgacagttcaggcgtgagcggctggcccaacagcaattccagcgcgttacgatcccgcgccaactgtcgcgtatacgccgcgcgattgatttcggcagaacgcagcgcgatctccgccatacgcagatcgagctgtgtggcgttacctgtccgggcaagctgggtcgtcaatgtgtatgaacttttttgcgcggccagcgtatcctcggttaagcgcagcagctcccggtcagcccgtagcgtcagccaggcgctggcgacttcggaaaccaggctcattcgcgccgcaatgtacgtctcatcaagcgccatataggcggctaatgcctggtcgctaaggcttcgcactcgcccccagagatccagttcccaggccgtcgtcgccccagccgcctcgtagcgtcggttaatctcagactcgtccatgacgctgagatcggcgggagtgcgactggcgtccatggcggtggcgatgccgagcgtcggcagcatctccgcgcgctgaatgcggtataacgcccgggcggcttcaacattgagccctgccttgcgtaaatcccgattattgcgtaacgcgatcgcaatcagttcctgtagaagcggatcgtggaagaaatcacgccagccaatgtcagcggcatccggcgcgccagaaacggttgacgttgcgtagggatagaccatcgcagtcggcgatgcggggcgttcgtgcttcggcgccatcgtacagccagcaagcgtggtgacgaaagcaagcgtcgccagcgtggcggtctgccgatagcctgtaaaagtgatcttcattatgccattcccatcattatgcttgctgatcatgcgaatcaacgcggttctcacgctttaatgccatcctgcgaaccaccacgtaaaatacaggcgtcaataacaggccgaagagcgtgacgcccaacatgccggcaaacacggcgatgcccatcgcatgtcgcatttccgcgccggcacccgtcgcgagtaccagtggtactacacctgcgataaaggcgaatgaggtcatcaggataggacgcagacgcaggcgggacgcttccagtacggcggtcagcgggtctgcgccgtcgtgttctttggcgcgggcaaactcgacaatcaaaatggcgttcttggccgccaggccgaccagcaccacgaaaccaatctgcgtaaagatattgttatctccgccagatacccacacgccgacaatggctgagagtaatgacataggcgcaataagcaggacggcgaagggcagcgaccaactgttgtactgcgccgccaggatcaggaaggccagcagcaccgccagcgcaaagatagcaagcgcagagttgccggcctgtttttcctgataaaccagatcggtccattcgaagaccatcccttccggtaacgtttcacgcacgatcttttcaatcgcgtccgtcgcctgtccggaggagaagcccggagccggtccaccgctaatatctaccgaggggaagccgttgtaatggatgattctgtccggccccgactggcgcataatcgtgacgaaagcgctaagcgggatcatctcgcccttcgcattgcggactttaagcaggccgatatcctcttgctgcatacggaatggcgcatcggcctgcgccatcacccgccaggcacggccaaatcggttgaaatcgttgacgtaaagcgagccgaggttaatttgcaacgtttcaaagatgtcggtgagcgatacccccattgatttcgcctttacccggtcgatatccacctgtaattgcggggcgtttgtctggaaactggccagcatattggccagttcgggcgtctgcatcgccttagacataatctcgctttgcacctttgtcatcgcttcaaatcccagttccgcacgatcttcaatctgcaatttaaagccgcccgtcgcgccaagccctggaaccggcggtggcgggaagatgccaataaatccgtcgggaatgtggctaaatttgtgcattagctttccggcgatagcgttagcggaaagcgaaggatcttcacgctcgtcaaagggtttcagcatggcgaacatcagcgccgaatttggcacatttaccgggccgttaaccgacagaccggggaagacgacgacgctttcaacgccgggttccgccagcgcgatagcggacatctgtttcacgaccgcctctgtgcgatccaacgatgcgccgcttgggagctgggcgatgccgacgagatagtatttatcctgcgcaggcacaaacccgttcggcacctgatggaagccaagccaggtcagccccacaaagccagcatagagcaccatcacaatgacgctgccgcgcacggcccgacggacggcgctaacatagcggttcgacgcgctgtcgaagaaacggttaaagcgatggaaaaaaccgccagtgaccgtgcccatcaaccgcgttagccagtcagccttcgcagtatcgtggtgcggtcttagcaaaatggcagccagcgcaggggagagcgtcagcgagttaatggccgaaaggatggtcgaaatagcgatggtcaacgcgaactgacgataaaactcaccctgcaggcccgccaggaatgcggaagggataaagaccgccgttagcaccgaggtaatagaaagaatgggaccagtgacttcatccatcgccttctttgccgcctctccgggacttttgccctgcgagatatgccgttccacgttttcgaccacaacgatggcgtcatcgacaacgatacctatcgacaggaccaaaccaaacagcgaaagcgtattcagcgaaaagccaaacaggtgcatcaaggcaaaggtgccgaccagcgaaacgggaaccgccaccagaggaataatggacgcccgccaggtttgcaggaacatcaccacgacaaggacgaccagcacgagggcttccagcaacgtaatcgccaccgattgtagcgatgcgcgcacgaagaccgtaggatcataggcaatccggtattcgatatcctgcgggaagttttgctgcaactcatccattttgccgcgaatcgcgttagaaacgtcaatcgcattggcgcccggactttgaataatctgtaacgctggcgccgcttcgccattcagtaaactgcgcagcgtataggcatctgcgcccagcgtgacgcgggcgacatcacgcagacgcgtcacctcgccgtcagcgccgatttttaccacaatctcgccgaactgttcttcgctggtcaggcggcccagcgtgtttaccgtcatctgaaaagcggcggaggcctccggctgttgcccgacggaaccggcggcgacctgtacgttttgttcccgcaacgccgtaacgatatcactggcggtaagaccgcggttggcgattttcgccgggtccagccagacgcgcatggcgtactcgcccgcgccccagacgagaacatcgccgacgccgggtaaacgggccagttcgtcgcgaacctgccggatggcgaagttagacaggtaaagcgagtcatagcgtttttgcggcgagacaagatgaaccaccatcaacatatcgggggacgttttctccgttacaacgccaattcgctggacttcttcgggcaggcgaggcagcgcgcgggatacccggttttgcacctgaatttgcgccatatcaggatcggttccctgttcgaaggcgatagagataaccatgcgaccatcaatggccatctgggtattcatatacaacatgccgtcaacgccgttgatcacctgttccagcggcgcggctaccgtatcggcaatcacttgcgggttagcgccggggtagctggcgctaacctgtaccgtgggcggcgtaacggccggatattcactcagcggcagttttaaaaaggcgatagcgccagccagcagcattaacagcgacaggacgatggcgaagatggggcgtgcaatgaaaaagtgggtgaatttcattggcgcaccgccttcggcgcactgtcgccgtccgctttagtcaatgtcgcggtctgtttgtcggtcacattctgccgcatcggcaccagacgtggcgcaacggtcatgccaggacgcaccagccccttgaggatgattttttctcccggcagtactccctgtgtaacgacgcggaatccatcgaccatttgtcccaactcaaccggacgatactccacctgattctccttgccgacgatcagcacatagtttttgccctgatcggcgctcaccgccagatcgtcaatcagcacggtttcccgcggctcgccgatgggcaaactgattcgggcaaacaggccgggagaaagcattccgtcggggtcaggaatcacggcgcgtgcccggatagtgccggtgctgcggttcatctgattgcccataaagtcgagtacgccctgataaggcagcccgttatcggtggttaaccccatgttgactaccggtggatttttgtcggagcgggtatgccgtaacgccttcagccaggtggcttcgtcaatatcgaaatacacatacatgggattgtgagacacgatagtcgtcagaagcgtggcgttacccgctacgccgccgctgaccagattgccccgggtcaccagtatgcggtcaacgcgtccggcaatgggcgcggtaatacgggtccaggagagttcaaggcgcgctgcggcgacggcggctttggccgattgcatctgcgcctgtcgcgcattacgcgtggcggtgacatcgtcagcgtttttacgtgatacggcgccgctggcgaccagtcgttgaatgcgatcgaaatccgcctgcgcctggcgggccagtacttcagcctgacgtaattgcgcgacggcggtgtcgagggcgacctcgaacgggcgcggatcgatctggaacagcagttgtccgcggcttaccagacgtccttccggaacgctgatggcgtcaagggttcctcccacgcgcgaacgcagctccacggtttccggcgcggccagaaaaccggtgaattccgccgtaggcgcgagtgtacggctaagggctttagcaaccggtaccgacggtggaggcggcgcgctggccggggggccgacggcgttgtctttatcccatagtgcttcgccggccatgtaaatcacgcccccgatggcggcgatgacgccggctatcaacataattttgaatgttctacgcatgtcgtttccctctttaccgcagcgtgtcggccattccgcaacgctgccgcagaatttttggcaaaggctaggcgttacaacgaaggaaaggtcaagcgttcctgacgggtttttacggggcgtgggtcggcatcgtggcgtaaatgtctcgcatcatcctcttttatgagccatctcacattctcgccgaaccgtgcagcctgaatacgcttgaccttcccacaatggcaagctttaggctttctgataccgaatagtcaggatggggaagtcgtcatgagtcagtcagaaaatcgtcacgacacgataagcttacttattgaaggtatgacctgcgcgtcgtgcgtcgctcgcgttgaaaaaggtattaaggctgtgcctggcgtaacggacgctacggtgaatctggcgacggagcgcgccaccgtccgcgggacggcgtcggcggaggcggtgatcgcggcgattgaaaaaacggggtataaggcgcgaccgatagagacggcggggcagggcgaagacgactctgaagagaaaaaagaggccgagcgcgtcaggctgaagcgcgatctgattctcgccagcgtgctggcgctccccgtttttgtgcttgaaatgggctcgcaccttattcctggtatgcacgagtgggtgataaaaacgattggcctgcaacaaagctggtactggcaatttgcactgaccctgttggtgctgacgatccccggtcgccgtttttaccttaaagggttcccggcgctggcgcgtctggcgccggacatgaactcgctggtcgccgtgggaaccgcagcggcattcggctactcgctggtggcgacctttacgcccgacctgttgcctgaagggacggtaaacgtctattacgaggccgccgcagtgattgtcgcgcttattctgctggggcgctttctggaggcaagggcgaaggggcggacttccgaagcgattaaacgtctggtggggctacaggcgcgggtcgcgcatgtgttacgcgagggccgcatcgtggatatccctgtcgacgaggttgtgctgggcgactgtgtggaggttcggccaggcgagcggatcccggttgacggcgaagtgaccgaaggccgcagcttcgttgacgagtcgatgattaccggcgaaccgataccggttgagaaatccgcaggaagcgcggtggtgggcggtaccgtaaaccaaaaaggcgcgctcacgctgcgggcgaccgccgtcggcggacagaccatgctggcgcaaatcattcgtctggtggaacaggcgcagggttcaaaactgccgattcaggccgtcgtggataaagtgacgctgtggtttgtcccgatggtgatgcttattgctgcgctgacctttgtggtatggctggcgtttgggccgtcgccagcgctgactttcgctctgatcaatggcgttgcggttctgattatcgcctgtccttgcgcgatgggcctggcgacgccgacctctattatggtgggaaccggtcgtggggcggaaatgggcgtgctgttccgtaagggggaggcgttacagctactcaaagacgctaaggtggtggccgtagacaaaaccgggacgcttaccgaaggccgcccggtactgaccgatctcgacgtggccagcggctttgaacgccgtgaggtgctggcgaaagtcgcggcggtagaatcgcgttcagagcatccgattgcccgtgcgattgtcgtgtcggcagaagaggaagggatcgcgctaccaggcatgagcggcttcgaatcggtgaccgggatgggcgtatacgctaccgttgacggtacgcgtgttgacgtgggggctgatcgctatatgcgcgaaattggcgtggatattagcggcttcgccaccaccgccgaacggttagggcaggaagggaaatcgccgctctatgcggctattgacggtcaactggcggcgattatcgccgtggccgatccgatcaaacccagtacgcccgccgcaattaacgctttacatcagctcggcattaaggtcgccatgatcactggcgataatgcccgcacggcacaggctatcgccagacagttaggaattgatgatgtggttgccgaggtattgccagaagggaaagtcgaggcgatacggcgcctgaaagcggcgtatgggcaggtggcgtttgtcggcgatggcatcaacgatgcgccagcgctggcggagtccgacgtggggctggcgattggcaccggcaccgatgtggcggtggaatccgccgacgtcgtactaatgtccggcaacctgcaaggcgtgccgaatgctatcgcgctgtctaaagcgaccatccgcaatatccaccagaatctgttctgggcctttgcttacaatacggcgctgattcctgtcgcggcaggcgcgctatttccggtctggggcatattattgtcaccggtattcgccgcaggggcgatggcgatgtcgagcgtgttcgtgctgggcaacgctttgcggctgcgccgtttccgggcgccgatggcaaccccatccgacacatccacgacatgaggaggagcgtcatgaacatcggtaaagcagctaaagcatcgaaagtctcggccaaaatgattcgctactatgaacagattggtctgattcccgcggcaagtcggacggattccggctatcgggcctatacccaggctgatgttaatcaattgcattttatacgccgcgcgcgcgacctcggtttttcagttgctgaaatcagcgacttactgaatctttggaataaccagtcgcggcaaagcgctgacgtcaaacgcctggcgcagacgcacattgatgaactggacagacgtatccagaacatgcagcacatggcgcaaaccctcaaagcgctgattcactgctgcgccggcgacgcgctgccagattgccccattctgcatacgcttggacaacctgacgatagcgagccggaggcgcgtaccggagcggtattgcgacgtcctcgtcgccacggactggcaaagcgtctgtaagtcctgagattacgcttgaccttccaacactggcaaggtccagactggcaacagttcccacacaaaaggagttcactatgcagttccatattgatgacatgacctgcggcggctgcgccagtacggtaaaaaagacgattctgactctcgatgctaatgcgacggtgagaactgacccggcgacgcgtctggttgacgttgaaacgtcgctatccgcggagcagattgccgccgccctgcaaaaggccggtttcccgccgcgcgagaggtaatcgtcaatggcgatcggtctggcgacaggccggtcgcgatacgctagccacgcttcgcttttctttgcgtgagataatccccataaaaagtgtgacaaatcatgtgtcagtaagctttgttaataatatgtaatgatttgtctatttttgctaacattttacctgctatatacaaaaagataacaaataagtagcgcaacgctaccttgttacgtcgctttgacgacgggagcgctccagcgtttcgcccgcttcaaagcttgatgttattttttgatgcaggacactacctatgtacacccccctgaactggacgacgacacaacgacatgtggcgtttgcctgctttaccagttggatgctggatgcgtttgatttctttatccttgtctttgtacttagcgatctcgccgaatggtttcacgcttccgtatcggacgtttccattgcgattatgctgaccctggcggtacgtcccattggcgcgctgctatttggccgaatggcggaaaagtacggacgtcgaccgatactgatgctcaatattctgttttttacggtgtttgaactgctttccgcctggtcgcccaccttcatggcatttctgatttttcgggtcatgtacggcgtggcgatgggcgggatatggggcgtcgcgtcatcactggcgatggaaaccattcccgatcgttcgcgtggcctgatgtcgggcatttttcaggcgggctatccctgcggctatctgttcgcctcggttatttttggcctcttctacagtatggtaggctggcgcggtatgttcctgattggcgccctgcctgttgtcttgctgccttatatctggtttaaagtgccggaatcccccgtctggctggcggccagagcgcgtaaagagaataccgcgctgcttcctgttctgcgcaaacagtggaagttgtgtctgtatctggtgctggtcatggcgttctttaactttttcagtcacggtacgcaggatctctatcctaccttcctgaagatgcagcatggttttgatccgcatctgatcagtatcattgcaattttttataacattgccgccatgctcggcggtattttctacggtacgctatcggaacgtattgggcgtaaaaaagcgatcatgatcgccgcctttcttgcgcttccggtactcccgctatgggcattttccagcggatcattcacgattggtctgggcgcgttcctgatgcagtttatggtgcagggcgcctggggtgtcgtgccgacctggctgaacgagctggttccggcgaatgcgcgcgccgtgctgccagggtttgtttaccaactcggtaatttactggcgtcggttaatgcgacgttacaggcccgcatcgcggaaacgcatggtggcaattacgggttggcaatggcgatcgtggctggcgcggtggctattttaatctgtgtatttgtggcatttggtcgcgagacccggggagtcgtcatctccggtacagatagcgacgccctcccggagtcggccatcagtcatcgcacgtaaacactacgctcctggcgcatactgtcgccgggagcacgccttcctcccgtcgttttcacgccctttcaacgaacaacaaaggttaatgatggcatctgccgttcgtgaccattacaatcatcgcttacttttttctttataagaaattgattgctgcaccttaaaattatcaacggagcgaagatatcatgttgaaagataaccaaaaacacaacgagtctgttgccccgaatagcgcctttctgtctgagttacaacgtgcattaccggaattttttaccgccgatcgctataacgagcagggcgaactgatcgcgaaaggcggatttgatctcgccagatttgagcgcgcgctgaaagcgcgtaatattgatgagctgactagcggttatcagattgattttattggcaaagattacgcaaaaaaacaggcgggtgaaaaatccgttaccgttatcgttcctgacgtggaacacaatactctggcagaaaataaaaacagccataatctttttctgaccggagataatctggatgtgttacgccatctgcaaaataattacgccgataccgtcgatatgatctatatcgatcccccttataacaccggatcggacgggtttgtctatcccgatcattttgaatatagcgatcgggcgttgcaggatatgtttggtcttaatgataccgaactggcacgtttaaaatccattcagggtaaatcgacgcactccgcgtggttatctttcatgtatccgcgtcttttcctggccaggaagctcctgaaagataccgggtttatttttatctctatcgacgataatgagtacgccaatcttaaattaatgatggatgagatttttggcgaaggcggatttgtcaccaatgtgatgtggaagcgcaaaaaagagatttctaacgactctgataacgtttccatccagggggaatacattcttgtttatgccaaaaccggtcagggcgctttacgtttagaaccgctttctaaagagtatattcagaaatcctataaagaaccgaccgaacagtttccagaagggaaatggcgaccggtgccgttaacggtgtcaaaagggctgagcggcggcggctatacctataaaattaccacgccgaacggtacggtacacgaaagactatgggcttatcctgaagccagttaccaaaaactggtggccgataatctggtctattttggcaaagataacggcggtattccccagcgagtcatgtacgcgcatcacagtaaggggcagccaacgaccaattactgggataacgtagcgtcgaataaagaggggaaaaaggagattctggatctcttcggcgacaacgtttttgatacgccgaaaccgaccgcattattgaagaaaatcatcaagctcgctatcgataaagacggcgtcgtcctggacttttttgccggttccggcactacggcccatgcggtaatggcgctgaatgaagaagatggggggcagcgcacgtttattctgtgtactatcgatcaggcattaagcaataacactatcgcgaaaaaagcaggttataacactattgatgaaatcagccgcgagcgaattacacgcgttgcggcgaagatccgcgccaacaatcccgcgaccaatagcgatctcggttttaaacattatcgttttgccactccgacacagcagacgctggacgatctggatagcttcgatattgctaccggccattttatcaataccagcggtcaactggccgctttcaccgagtcaggatttaccgacatgatcaatcctttttccgccagaggattgggcgtgccgggcggcgcaagcggcgaagagaccttattaacgacatggctggtcgccgatggttataaaatggatattgacgtacagaccgttgatttttccggctattgcgccaggtatgttgataatacgcgcctgtatctgattgatgaacgatggggaacagagcagacccgcgatcttctcaaccacattggtacgcaccagcttccggttcagaccattgtcatttacggctactctttcgaccttgaatccattcgtgaactggaaatcggcttaaaacagcttgatcaaaaagtgaacctggtgaagcgttattaagaggggatgatgatgaatattttactggaagaacttccccatcaggaacaggcgttagcggcgattctggcgagtttcaccggtatcgatcacgcgcaagccgatcataatcactatgctaatccgctgattaaggaacgttacgacgataaggccaatattgacgttaaaatggagaccgggacgggtaaaacctatgtctatacccggttgatgtatgaattgcatcagaagtatggcctcttcaaatttgtgctggtggtgccgacgccagccattaaagaaggcgcgcggaactttattaccagcgattacgccagacagcatttttcacagttctacgaaaatacgcggatggaactttgcaccatcaacgccggtgattttaaagtaaagtcggggcgtaaaaattttccggcccagctattaagttttactgatgccagccgtcgtgatagccatacgattcaggttttgctgatcaatgcgcaaatgctcaattccgccagtatgacgcgagacgattacgatcaaacgctcctgggcgggctgacgtcgcctgttaaagggctgcaaatgacgcgaccggtggtcattattgatgaaccgcatcgttttgcgcgagataacaaattttatcgagcgattcaggctattcagccgcaaatgatcgtccgctttggcgctaccttcccggatattgtcgaaggtaagggtaaaaataaatgtgtacgtaaagattactatcgccggcaaccgcagtttgatctcaacgcggtggacagttttaacgatggtttggtgaaaggtattgatatttattacccgaatctccccgaagaacaggccaacaatcgttatatcgttgacagcgtcacggcaaagaaattaatcctccgacgggggagcaaaattgccgaggttggcgtgggcgaaaatctcgccgatgtcgatgcaggatttgaaggcagtatcgaatatgccggcagtaaaatgttgtcgaacgatctggagctggaggcagggatggcgctggtgccaggaacctttggcgcgagctaccaggaactgattattcaggacgctatcgataagcattttgacactgagcaggcaaatttcttacgcagcaatgagccagaaaataatgccccgcgtattaagaccttaagccttttctttattgacagtattaaaagctatcgtgatgacgaaggctggttgaaagtcacttttgagcgtttgctgaaaaagaaactgacgcaactgattgacgattatcagcgcaagaccctgccgcgagaagtggagtatctgtcgtttctgcaggccacgctcgccagcctgcactcggataaccaaaacgtccacgctggttactttggcgaagaccgcggaagcggcgatgaggcgatccaggctgaggtagatgatattctgaaaaataaagagaagttgctcagtttttcagaccatcacggcaactgggaaacgcgccgctttctgttttcaaaatggacgcttcgcgaaggctgggataacccgaatgtttttgtcattgctaaattacgttcttccggtagcgagtcgagcaaaattcaggaagtggggcgcggcctgcggctaccggtagatgaaaatggtcatcgcgttcatcaggaagagtggccgtcccgactgtcgtttctgattggttatgatgaaaaagcgtttgccagtatgctggttgatgagattaatcgcgacagcaaagttcagcttaacgagcagaagctggatgaggcgatgatcacactcatcgtcaccgagcgacaaaaagtcgatcctgcgtttacggagcttcgtttgctggaagatctggatgataaaaaactgatcaaccggagcaatgagtttaaacccagcgtcacgcttaacggggaaaccaaaagtggttttgcgtggctactggagttctaccctgagctgacgcaggcgcgggtgcgagcggatcgcattcgtgacaataagcccgcctcccggctgcgagtcaggttacgcaaagagaattgggaacaacttagcagtatctgggagcagttttcccgccgttatatgctgcaattcgagcgtagcggcgcttctctggaacaaattgccgccgaggtgctgcgcgatccggcgctgtatattcgccagaagccaagccaggtgcaacaacggctggtatcgaatgaagataatggccgttttgaagtggcgcagcgggaaggcgaattagccgccagcgaatttatggcgggcatgaaatatggccattttcttaagcaactggcgttacgcaccagtctgccggttaacgtcctgcacccggtgttaatggcgatgctgcgtgatgttttgcacggagattcacgctatttaagcgagatctcgttggacaatatgacccgcgcattacagacgcggattaatgcgcattttgcgcagcgccacgattatctgcctctcgattttcaggcttcaacgtcggtatttgattccacggcacggcagttcagagaggagattagcgctgaaattgtggggaaaaatgtggatgagaatgcgatagacgatccccgttctctctatcaaataccgccgttgcgttatgacagcgtcgatccagaattgccgctattaaaatacgattatccgcaacaggtttctgtgtttggcaaactgcctaagcgggccattcagatccccaaatatacggggggctctactacgccggattttgtgtaccgtattgagcgtcaggacgccgacagcgtttatttactggttgaaactaaagcagaaaatatgcgcgtaggcgatcaggttattcttgatgcgcaacgtaaattcttcgatatgctgcgtcggcaaaatatcaatgtcgagtttgcggaagcgaccagcgcgccggcggtattttctacgatcaatggcttgattgaggggaaggcaaactaacgggtttgaatgaaccttaacggttatctttttgatagaccatataaaatggccgccgcgcagcgagcgttgcggtcattctccctgtgctaatcccccgtcccgtaaaccgcgttgacttgaaggttatcgttttacgtctattcttaactttcagctacgcgtattttgctgaaattgcaaatagtcttgaagacgctgtttttttgttttgccgttatttttataacggccaggtagatattgccaagtgaatgtaactaagggagacatgttatgctaaatagatactaccgtttcgctgtcgaaaaagacgacccctccgaagcgccagagtcgggcgataagcctgacagccagccgcaaaaaaaatcgtaatttatctggatattccccgacgtttatacgtttggggaaaataaccgtttcgtttcaacctggttgcgaacagtgaatattttacacgaagtgactatatataaacgggagggaacatggagtttgatgccttctttttagcgagactccagtttgcctttaccgtctcttttcatattattttccccgcgattacgattggcttagccagttacctggtggtactggaaggtttatggctaaaaacgcgtaatcctgtctggcgctcgctctatcagttctggctcaaaatttttgccgtcaacttcgggatgggcgtggtctccggtctggtcatggcttaccagttcggaacgaactggagcggtttttcccagttcgccggcagtatcaccgggcctttattaacctatgaagtgctcaccgcattcttcctggaagcgggattcttaggcgtgatgctttttggctggaacaaagtcgggccgggtctgcatttcttgtctacctgtatggtggcgttgggcacgttaatgtcgacgttctggattctggcgtctaacagctggatgcataccccgcagggatttgaaattcacaacggtcaggtagtcccggtggactggttcgcggtgattttcaacccgtcgttcccgtatcgcctgttgcatatgtccgttgcggcgtttttaagtagcgcgatgtttgtcggcgcgtccgctgcctggcatttactgaaaggtaacgatacgccggctatccgccgtatgttctcgatggcgttatggatggcggtcgtggtggcgcccgttcaggcattgattggcgatatgcatggccttaacaccctgaagcatcagccggtcaaaatcgccgcgattgaggggcactgggaaaatacgcccggcgagccaacgccgcttacgctggtaggctggccggatatggaggcggaacggacccgctatgcgcttgagatcccggcgttgggcagtctgatcctgacgcatagcctggacaaacaggtgcctgcgctaaaagattatcccaaagaggatcgccccaactctaccgtggtgttctggtctttccgtctgatggtgggcatgggcgtactgatgatcttcctggggctggccagcctgtggctacgctaccgacgccgactgtatcattcgcggccctttatgcactttgcgctgtggatggggccgtccgggcttatcgccatccttgccggatgggtgacgacggaagtaggacgccagccgtgggtggtctatggcctgctgcgaacgcgtgatgcggtttccgcgcacagtaccttgcagatgagcatcagtttgctggccttctttgtggtctattccctggtctttggggttggctatatttatatgattcgccttatccagaaagggccgcagccggcggagacaccgaccgctgaaaccgatggcagacccgcgcgtcctatctctgccgtgggagaatcgcttgagcaggagaaacgcgaatgaccatcgatcttccggttatctggtttgctattatcgtgttcgccacgctgatgtatatcgtaatggatgggttcgatctgggcgtcggtatcctgtttccgtttattcgtgataaacacgatcgcgatgttatggtgaactcagtcgcgccggtatgggacgggaacgaaacctggctggtgctgggcggggccgggctttttggcgcgttcccgttggcttatgccgtcatcaccgacgcgctgactatcccgctggtggttatgctgcttggtcttatctttcgcggcgtcgcttttgaattccgttttaaagccaccgagtcgcatcgcgcgttctgggataaatcctttatcgtcgggtcaatcctggcgacctttgcccagggggttgtggtgggcgcggtggtgagcggttttcaggtggaagggcgaacctttagcggttcgcagcttgactggctgacgccgtttaacctgttctgcggcgtcggtctggttgtcacctacgcgctgctgggcgctacctggctgattatgaaaagcgaagatccgctgcatagccggatgtgcgcgctgtcgcgcccgttgttgatcgtcttgttgttggtgatgggaggcgtcagcgtgtggacgccgctcacccacgacgacatcgccgagtgctggttcacgctgcccaatttatactacttcctgccggtgcctgtgctggtgttggcttttagcgtctggctatggcgcagcgtgaaaaaaccagaatcccatgcgcgtccatttattctcacgctagggctgatttttctggggttcagcgggttaggcatcagtatttggccgaatattattccaccggatatttcgctgtatgccgccgccgcgccgccgcaaagtcaaagctttatgctggttggggcgctgataatcatcccgattattctggcttataccttctggagctactacgtcttccgtggaaaagtgcgacatggtgagggatatcactgatggttaaagtgaaaaaatggtcgcggcgagtcgtatggatggtcgcgatatggtgcgccagcgtgcttctgctggcgggcgtcggaatgttattcagactgctcatgacctccgcaggatttcgctcctgactgatacccccggacgcgctttcgtcgctggcgaaagcgcgtttttatcgacagatcggcgtttatcgatcacctttgctcgccttatctctcccctcaatagcggttgataattattctcatctttattgtcgttcccgggccgcagtgatatggttacacagtggctaacgctctggtataacgcagataaacggtattgataatgtctccgatctcctgtcactcttccgccgccccggcgatgaaaaagatcttttccgtcagcgacttcatcgcgtttggcgagcgttatggcattgattaccgcttccctgcgttaccgcagtatacgcagagtagtcccgtacttcatggcgatatcgaagagatagcgcttcccggcgggatttgcattacacgctcggatgttcacgtgttacaaccttatgaaaccacctctcgccatagcagtccgctgtatatgctggtggtgttggaaggtaacgtcgcgctggctgtcaatgagcagacctttttgttgagcgcggggatggcgttttgctcgcaactgagtgagcagcagacgatacgcgcccatcacggcgcagacagtaaattgcgcaccttgtcgctgggaatgtacccggacggcggatggcgggagcgtttgcctgtctcgctggcagacgagtgggaaaatagcgcaacctcggcgagggtctggcaggtgccggagtttctgctttcggggctacgttatgcgcagcagcccggacctcatgcggcgtcacgccagttaatgctggaaggcatcatgctgcaattgctgggctatgcgctaaatctatgtcagccggcaacgcaaaaacgcgggcttcccgtcaccggtgaataccagcggctggagctcattcggcgtttactggagcagacgccggaaaaagcctacacgctgaacgaactggcgcgtcgggcggcaatgagtccaagtagcctgcggtgcaagtttcgccatgcctatgggtgtaccgtgtttgattatctgcgcgattgccgcctggcgcgcgcgcgtcgttatctgatggagggatacagcgtgcagcaggccgcctggatgtcaggctatcaacatgccactaactttgcgacggcattccgtcggcgttatggctgctcgcccggcgagctgcgtgacgcgtctcttacggcgtcccgccactgtgcgtaacgcgccccgccagagcggtaatatccgccgctaacccggttttctgccgctttgggtgattttttatcattgcgcataggcaatctggcgttacgcatagtggtccgtcatctctaaaaggtaataattcttatttacaataaagatgcctttggagatgttcatgtttgcgacaacgcgtatggcgctattgataggcggagctatcggcggcgcgacttttcctctttttgcccaggaaaccacaaaaaatgataccgtcattgtcacctcgcccgttcagagtggcgcgaccaagctggcgacgccagatattgaaacgccgcagtcggtatccattattacccgccagcagtttgaagagcagggcgcaaccagcgtgcgtcaggcggtcagctacaccccaggcgtatacagtaaccagataggcgcctctaaccgctttgattacatcgtattgcgtggtttttcggacggtagtctggataacgtctatctcgacgggttaaaaatgatgggcgacaccaattcgcacagttcgttggtggttgacccctggtttctggaagatatcgaggtggtacgcggcccggcgtccgttctgtatggacgttcatcgccaggcggcattgtcgcgctgacgtcgcgaaaaccggcgtttgatgccggaggagaagtgaagctgtttgccggcaataacaaccagcgcggggcggcttttgatgtgaccggcccactggatgacaatgaacgtgtggcggcgcgtcttagcggcatgacacgttacgccgattcgcagtttacccccttgaaagaggaacgttatgcgctgatgccgagcctgacctggcgaattaccgatcggacgcgtcttgatcttatggcctatctgcaccgtgatccggaaggcggtagccactccggactgccttatcaaggcacggttgtaccttataacggcggaaaaatttctaacactttctttgaaggtgaagatgactacgacaaatacgatcgccgtgaaaatatggtgggttataacattgagcatctgttcgataacggctggtcggtacggcaaaaattgcgctatttgcataccaaagtgacgttgaatcaggtctatgccgcaggttggttgaatgaaacggcgctgaatcgcggctattccggctccggggagaaaatgtcggctatcgcgctggataatcagctcgacggcagcgtggataccggggcgattaatcatcgtctgctggtggggatcgattatcaggatcgcagtaaccatactactggctattatggcgcgtttccgccgattgacgctttcaaccctgtttatggcgctcagccggattacattacgttgtatagccgtgaaaaacataagctgcggcagaccggatactatttacaggatcagatgtcatgggatcgctggcgctttacgttgggcggtcgttacgatcgggtcagcgtgtctaacatcgacaaacttcatgattcacgcagcgatctcgataaaaacaacgtcagtacccgtgctgcgttgctttatctgttcgacaatggcgtcgccccctatctcagttattctaccgcgtttacgccgaccagcttcgccgacgaaaacggcaatgtgctggaaccgatgaaaggcaagcagtgggaggcgggggtaaaatacgaaccgccgggggggaatagccagtttagcgccgccgtgtatcgtattaatcagaccaatatcgcgaccaaagaagaacctaccgatccgtaccgctcgattggtgaaattgagtctaaaggggttgaactggaggccattagccatttgtcggatagcgtccgtttgcaggcggcgtatacctatactgatatccgttataagaaaagtagcccgcaagaacagggtaagcgcgcggtttatgctccacggaaccaggccagcgcctggctaagctacgatgtgaaaagcggtctgttagaggggctgactttgggctccggcatccggtacgtcaacggcgtgaccagcgatcgcctgaatacccacacattgccgtcctatacactggtcgatatggtggtagggtatgatttatccagcattgggttaaatggcttgagcgcccagctcaacgtaaataacctgacggacaaacgctatgtcgctgcctgtaattcgctctcttattgttattttggcgccgagcgtagcattgtaggcagcgtgtcatgggcgttttgataacgcttatcgtccggtagcaaaggctaccggacaaacattagcggtgcgtcacgccttcatagagaagtctgagcgcaaacatcccgataatggcgccgataacacggctggcaatgcgctgtattcgtccataagcgcggcggactgcggggagcgaaaaggcctggctgagaaaaatacgccagataacggatgacagcacaattccggcccaggccattaaccttgcccatgtgggcgtttctgcgctaagcgttacggaaaaaatactgataaaaaacagtacggtttgcggattggataaatcggtcattaatccccggcgaaagaaaattgtccacggggcggcaatcggcgtctggagcgtgctcatttgcggcgtcgcctggtggcgaatactgttccaggcgaaccataataaataggcgccgccgacaattttgataagagaaaataccgcttcgcattgcgtaatgagcgtcgccagaccgaaaagccccagcccggaataaaaggcgtctcccgtggcgacgcccaggccggtgatgactcccgcccggcgtcctgatgcgaggctggtttgcaccaccacaaacagattcgcgccgggattaaaaaaggttaacacaaacagactgacggtaagcacaacggcatgaaacggctccatagacaactcttcccatagcctcaagaaataacgttcatcttattaatagtcaaaccagatgattgcgagtgagatcacaaagcaggggcgttttaatccgcgttgttacgccgacagagcgggggctgactggatttttccagcaatctacactacttatttaatcagtccgaacggcctttttgttctgataaagcgatgatggcgtaataataaaacgagggttttgctatgaaaactggctacaaggttatgcttggcgcattagcgtttgtcgtgacaaacgtttatgccgcagaaatcatgaaaaaaacggactttgataaagtcgcctccgaatacacgaaaattggcacgatttccaccaccggggaaatgtcgccgctggacgccagagaagatttaatcaaaaaggcggatgaaaaaggggcggatgtggtggtgctgacgtccgggcagacagaaaataaaattcatggtacggctgatatttataaaaagaaataaaagcattgcatcataaaaatacccgcctgggtttccggcgggtatatttattcctggcaaccggcatccgttttgccggatgacggcctgcagtaaacgtagcgccatcaggcattcaggacgctgtcatttgtcttaattatccgactggtctttggcaccagcttttaaacgacgccacagagtggtgcggctaatccccagataacgcgccgcggcggtcttatcgcccttaaagcgcgccagtacatcctgtaacgcgttcgcatccacggttgaaggcgtcagttctgctgtgttcaccataagctcaggtaataactgccgcataaattgcctgtccagcgttggcgcgggatcgacgcttaaaaaaagcgccaggcgctccatcatattacgcagttcgcgaatattaccgggccagcgccaggccagcaaaagcggctgacactgtgtcaatccatgacgtatcgattcggtaaacggaatttccatcgccgccagcgactgttttaaaaagctttccgccagcggcaaaatatcagcctgccgctcgcgcaaaggaggaagcgtcagacgcagaatactcaggcgataaaagagatcggggcgaaaacgtccttgcattatctcccgatccagatcgcaatgcgtagcgctgatcacccggacatccaccgggatcggctggtgtccgccgacgcgagtgacggctttttcctccagtacgcgcaaaagtcgggtttgtaacggcaagggcatttcgccgatttcatccagaaacagcgtgccgccgtgtgcgatttcaaacagccccgcccggcctcctcgtcgtgaaccggtaaacgcgccctcttcataaccaaacagttccgcttccagcaacgactcggtaatcgcgccgcaattgacggcgacaaagggaggggatggcttattctgacggtgaggctggcggtgaaagaacgtctggtgaatcgcctgcgccgccagctcttttccggtccctgtttccccctgaatcagcactgccgcacgggagcgggcatagagcgtaatcgtctggcggagctgctccatttgcggcgactggccgcgtatatcgcccagttcataccgggtttgtaatcccttgccggatgggtaatccacgcgctggcgccgtgtcagacgggtcatatccagcgcatcatgaaaagcctgacgaacggtcgccgcggaataaataaagatggcggtcattcctgcctcttccgccagatcggtaattaatcccgcgccgacgacggcctcaataccgttggccttaagttcgttaatttgcccgcgcgcgtcctcttcggtgacatagcttcgctgttcaagacggaggtgaaacgttttctgaaaggcaagtaaagccggaatggtctcctgataggtcacgataccgatagacgaggtgagctttcccgctttcgccagcgcctgtaatacatcgaatccgctgggcttgatgaggatcaccggtattgacaggcggctttttaaataggccccattcgaacccgccgcgataatcgcgtcgcagcgctcggtcgccagttttttgcgaatgtaggtcaccgccttttcaaagccgagttgaataggcgtgatggtcgccagatgatcgaattccaggctgatatcccgaaacagttcgaacagacgcgttacggagaccgtccagatcaccggtttatcgctattatcgcgcggagcgctgtgggcagtcgtcatcgcagtagattcatctttaaggggcgattttttgttttaaacgtgtttcataaatgttgcaatgaaacagggtgattcgtttcatgaaacgttagctgacacgtttttttttcccttaatcgcgcttattcataacagaaatgactgtaattacctgtttttaaatctcattgtatttaattttctcgctgcctctttgcctggcatagcctttgctttggtgaatacatcttgaataacaatttactaacatgaggacgagatatgtctttacattcgccggggcaggcatttcgcgccgcgctcgctaaagagaatccattacaaattgtcggcgctatcaatgccaaccatgctctgttggcccaacgggccgggtatcaggctatctatctttctggcggcggcgtagcggcgggctcgctcggactgccggatctggggatttctacgctggatgatgtgttaaccgatatccggcgcatcacggatgtttgcccgctgccgctgttggtggatgcggatattggctttggctcctccgcctttaatgtcgcgcggacggtaaagtccatagccaaagcgggcgccgccgcgctgcatattgaagaccaggttggcgctaagcgctgtggacaccgtccaaacaaagcgatcgtctcgaaagaggagatggtagaccgaattcgggcggcagtggatgcgcgcaccgatccgaactttgtgatcatggcgcgtaccgatgcgctggcggtggaagggctggaggcggctctcgatcgtgcgcaggcttacgtggacgcgggggctgacatgctgttcccggaggcgatcaccgaactgtcgatgtaccgccggttcgccgacgtggcgcaggtgccgatcctcgccaacatcactgagtttggcgcgacgccgctgtttacgaccgacgagttgcgcagcgcacacgtggcgatggcgctctatccgctgtcggcgtttcgcgccatgaaccgcgccgcagaaaaagtctataccgtgctgcgccaggaagggacgcaaaagaacgtgatcgacatcatgcagacccgcaacgagctgtacgaaagcatcaattactaccagttcgaagagaagctggacgcgctgtacaggaataaaaaatcgtagcctgtaggcctgataaggcgaagccgccatcaggcaatgccggatggcactacgtttaacccgcctacggtacggcctacacgcctcaataccctacacattacaataatgacgaggacaatatgacagacacgacgatcctgcaaaacaacacgcatgtcattaagcctaaaaaatcggtcgcgctttccggcgtacctgccggaaataccgctctgtgtaccgtgggaaaaagcggtaacgatctgcactatcgcggttacgacattctcgatctggcggagcactgcgaatttgaagaagtcgcgcatttactgatccacggaaaattaccgacccgcgacgagctgaacgcgtataaaagcaagttaaaagcgctgcgcggattacccgccaatgtccgtaccgttctggaagcgttaccggcggcctcgcacccgatggacgtgatgcgtaccggcgtctccgcgctgggctgcaccctgccggaaaaagagggacataccgtctccggcgcgcgcgatattgccgataagctgttggcctcgctcagctctatccttctttactggtatcactacagccacaacggcgaacgtattcagccggaaaccgacgatgattccatcggcggccatttcctgcatctgctgcacggtgaaaagccaacccaaagctgggaaaaggcgatgcatatttcgctggtgctgtatgccgagcatgagttcaacgcctcgacgtttaccagccgggtgattgccgggactggctcggatgtctactccgcgattatcggcgcgattggcgcgctgcgcggcccgaaacacggcggggcgaatgaggtgtcgctggaaattcaacagcgttatgaaacgccggacgaggcagaggcggatatccgtaaacgcgtggaaaacaaagaggtggtgattggctttggacatccggtttacaccatcgccgacccgcgccatcaggtgatcaaacgggtggcgaaacagctttcagaagaaggcggctcgctgaagatgtaccacatcgccgaccgtctggaaacggtgatgtgggagaccaaaaagatgttcccgaatctcgactggttttcggcggtctcctacaacatgatgggcgtccctaccgaaatgttcaccccgctgtttgtcatcgcccgcgttaccggctgggcggcgcacattattgaacagcgtcaggacaacaaaattattcgcccctctgccaactataccgggccggaagatcgtccgtttgtctcgatagacgatcgttgctaactcactcttattaaaaataaaacgcaggaaacgtaccctatgtctacccaagaactgaacatccgcccagactttgaccgtgaaatcgttgatatcgttgattacgttatgaattacgagatcacctcaaaggtggcgtacgacaccgcgcattattgcctgctcgacacgctcggttgtggtctggaagcgctggaatacccggcctgtaaaaaattgcttgggccaatcgtgccaggcacggtggtgcccaacggcgcacgcgtgccgggcacccagttccagctcgatccggtacaggcagcttttaacattggcgcgatgatccgctggcttgattttaacgatacctggcttgccgccgagtggggccatccttctgataacctcggcggtattctggcgacggctgactggctgtcacgcaacgccgtcgccgccggcaaagcgccgctgaccatgaaacaggtattgagcgggatgatcaaagcccatgaaattcagggctgcatcgcgctggaaaacgccttcaaccgtgtcggacttgaccatgtgttgctggtgaaagtggcctcgactgcggtggtcgctgaaatgctggggctgacgcgcgatgagatcctcaacgcggtatcgctggcgtgggtggatgggcagtcgctgcgtacctatcgtcatgcgccgaataccggtacgcgcaaatcctgggcggcgggcgatgcgacttcgcgcgcggtacgtctggcgctgatggcgaaaaccggcgagatgggctatccctcggcgctcaccgccaaaacctggggcttctacgacgtttcattcaaaggtgaaacgttccgtttccagcgtccttacggctcctacgtgatggaaaacgtgctattcaaaatttctttcccggcagaattccactcgcaaaccgccgtcgaagcggcgatgacgctgtatgagcagatgcaggccgcgggtaaaacggcagcggatatcgagaaagtgaccatccgcacccacgaagcctgtctccgcattatcgataaaaaaggcccgctcaataacccggcggaccgcgatcactgtatccagtatatggtcgccgtgccgctgctgttcggacggttaaccgcggcggattatgaagacgaggtggcgcaggacaagcgtattgacgccctgcgcgagaagatcgtgtgttatgaggacccggcttttaccgccgactatcacgacccggaaaaacgagctatcggcaatgcgatcaccgtggagtttactgatggatcacgctttggcgaggttgtcgtggagtatccgattggtcatgcgcgtcgccgcgccgacggtattccgaagcttatcgaaaaatttaaaattaacctggcgcgtcagttcccgactcgccagcagcaacgcattctggatgtctccctggacagagcccgcctggagcagatgccggttaacgaatacctcgatttatatgtcatctgagccagccagcagtaaggcgtaagttcaacaggagagcgtgatgtcttttagcgaattttatcagcgttccattaacgaaccggaggcgttctgggccgagcaggcccggcgtatcgactggcgacagccgtttacgcagacgctggatcatagccgtccaccgtttgcccgctggttttgcggcggcaccactaacttatgtcataacgccgtcgaccgctggcgggataaacagccggaggcgctggcgctgattgccgtctcatcagagaccgatgaagagcgcacatttaccttcagccagttgcatgatgaagtcaacattgtggccgccatgttgctgtcgctgggcgtgcagcgtggcgatcgcgtattggtctatatgccgatgattgccgaagcgcagataaccctgctggcctgcgcgcgcattggcgcgatccattcggtggtctttggcggttttgcctcgcacagcgtggcggcgcgcattgacgatgccagaccggcgctgattgtgtcggcggatgccggagcgcggggcggtaaaatcctgccgtataaaaagctgctcgatgacgctattgcgcaggcgcagcatcagccgaaacacgttctgctggtggacagagggctggcgaaaatggcatgggtggatgggcgcgatctggattttgccacgttgcgccagcagcatctcggcgcgagcgtgccggtggcgtggctggaatccaacgaaacctcgtgcattctttacacctccggcactaccggcaaaccgaaaggcgtccagcgcgacgtcggcggttatgcggtggcgctggcaacctcgatggacaccatttttggcggcaaggcgggcggcgtattcttttgcgcatcggatatcggctgggtcgtcggccactcctatatcgtttacgcgccgttgctggcaggcatggcgactattgtttacgaaggactgccgacgtacccggactgcggggtctggtggaaaattgtcgagaaataccaggttaaccggatgttttccgccccgaccgcgattcgcgtgctgaaaaaattcccgacggcgcaaatccgcaatcacgatctctcctcgctggaggcgctttatctggccggtgagccgctggacgagccgacggccagttgggtaacggagacgctgggcgtaccggtcatcgacaattattggcagacggagtccggctggccgatcatggcgctggcccgcgcgctggacgacaggccgtcgcgtctgggaagtcccggcgtgccgatgtacggttataacgtccagctactcaatgaagtcaccggcgaaccttgcggcataaatgaaaaggggatgctggtgatcgaagggccgctgccgccgggctgtattcagactatttggggcgacgatgcgcgttttgtgaagacttactggtcgctgtttaaccgtcaggtttatgccactttcgactggggaatccgcgacgccgaggggtattactttattctgggccgtaccgatgatgtgattaatattgcgggtcatcggctggggacgcgagaaatagaagaaagtatctccagctacccgaacgtagcggaagtggcggtagtggggataaaagacgctctgaaagggcaggtagcggtggcgtttgtcattccgaagcagagcgatacgctggcggatcgcgaggcggcgcgcgacgaggaaaacgcgattatggcgctggtggacaaccagatcggtcactttggtcgtccggcgcatgtctggtttgtttcgcagctccccaaaacgcgttccggaaagatgcttcgccgcacgatccaggcgatctgcgaaggccgggatccgggcgatctgacaaccattgacgatcccgcgtcgttgcagcaaattcgccaggcgatcgaagaatagccgtaagccggataagccgcgttcggcaacgggttagactcagcgactgaatagtggggtgtaaagtcgggaaagggcggcagcgcgccgccctgtaacagaattaacgcagaatatttttctcagccagatccagtgcgaagtagctgaaaatcaaatcggcgccggcgcgtttaatcgagcccagactttccagcacgaccttttcttcatcgatggcgccagccatagcagcaaatttaatcatggcgtattcaccgctcacctggtaagcgccaagcggcaactctgtgcgttcgcggatttcacgcagcacgtccagatacgcgccggccggtttcaccatcaagcaatccgcgccctgggcttcgtcgagcagtgattcgcgaatcgcttcacggcggttcatcggattcatttgatacgtcttgcggtcgccttttaacgcggtacccgctgcttcacggaaagggccgtagaaagaagaggcgaacttggtggagtaggacattattgccgtatcggtaaaaccggcggcatccagcgcctggcggatagcctggacttgtccatccatggccgcggagggcgcaataaaatctgctccagccgccgccgcgataacggcctgcttgccgaggttggccagcgtcgcatcgttatccacaccgtgttcgcacaacacgccgcagtggccgtgcgaggtgtattcgcagaagcaggtgtcggacatgacgatcatctccggcacggtttgcttacagatgcgggacattcttgccaccagaccgtcttctttccaggtatcgctgccggtgtcatcagtatggtgagaaatgccgaaggtcataacggaacgaatgccagcatttgcgatacgttcaatctctcgcgccagctgcttttccgggatacgcattacgccgggcatggcatcaatagctttgtaatcgtcgagttcttcttcaacaaagatcggcaacaccaggtcgttcaggctaagtgttgtctcttcaaacatagcgcgcagcgcagcggatttgcgcaggcggcgagggcgatggataaggtctgtcatggtctgcctgatgtttgtggaatcgaaggcccagtatacctgaatctgcaggcagatgttttacgaaaacggtccttaacgtagcaggcgcagccccggcggcggcggaacatggcgcttcttttatataccgaagattaatacctcaggcactatatcattttaaataagaattagttttacgttgtttttagttttatttcatcgtcatttaagtaaatgtgggttttaacattattcatgtttattttgtttttctttaatctatatttatcttatatgtattttgtttttttattttcttgtaaggtcatgaaaaagaatgcttttcaattataaaacttccttttattacgtctttttaattcatgtccgaatccggactgaggataaagaataattgaaccttttagcaatgacgccgcataatccttcttgctaaacatctgtatgtttttatgcattgataattgatggatcaactatattacgtccctgaggagggatgacaaatgcactcctggaaaaagaaacttgtagtctcacaattagcattggcttgcactctggcaatcacttctcaggcgaatgctactacttacgatacctggacttattacgacaatcctaccaccgcgcttgattggaataatatggatgccgcaggcactgttgatggtaactatgtaaactatagcggtttcgtttactacaacaatgccaatggtgatttcgatcagacgttcaacggtgacactgttaacggtacgatttctacctattatctgaaccatgattataatgacgcaaccagtaatgagctgaatattagtaattcagttattcatggctcgattacttccatgctgccgattggttattacgatcgttttgatacgttggatcacgatgggtattctgaatattatcggttcaacaacggtactgatactgttgacggaaactggtatgacggtgatgtgttcacgctgaacatcgctaattccaccattgatgatgattatgaagcgttttacttcactgattcctataaggatggtgatgtaactaagtacacaaatgaaacattcgatgtcagcgaaggcgtggcggtgaatcttgatgtagaaagcaacatcaatatttccaacaattcccgtgttgcaggtattgccttgtctcagggaaatacttacaacaacacttacacgacggaatcccataactgggataacaatattaatgtatttgactctactgtaacttccggttcagattatatcctggatagtgcttatactactgacactggtacttttggcacaggtcactttggcaattccgatgagccgagcgattatactggtgctggcgacgttgcattatctttcactgatgacaatggtgcttcagactatgcaatgaagaacaatgtgtacttcagtaattctacgctgatgggtgatgtcaaatttaccagtaactggaacgccaatttcgatgctgatggtgatgatactaacggtgatggtgttcctgataccaaccatggctgggctgatgacggcctcaacgtcgacgaactgaaccttacacttgataatggcagtaagtgggttggtcaggcgacttatactgttgatacaacgtcccgtatgtatgatgttgaaacgaacagccttactccaggcgcaacattggaagataatgcctggaatcgtatcgttggtaatgaagttttccagagcggcgtgtttaacgtgacgctgaacaatggttctgaatgggacaccgttggggactcgactgttgatacgctggctgtaaacaatggttctcaggttaatgtttctaattctgatttaacatcagacaccattgatttgactaatggttcttcactgaacattggtgaaggtggttatgttgacaccgatcacctgacaattgactcctatagtactgttggtttgaccgaatctactggctggagtacttactcaaacctgtatgctaataccatcaccgtaactaacggtggtgtgttggatgtgaatgttggtcagtttgataccgaagtattcagcactgataaactggaactgaccagcggcaatactgctgatcacaacggtaatgttgtttctggtgtgttcaatatccatagcagcgattatgttctgaacgctgacctggtgaacgaccgtacctgggataccactcaggctaactatggttacggtactatcgcaatgaactctgacggtcacctgaccatcaacggtaatggcgatatcaacaacggcgacgaactggataacagctctgttgacaacgttgtagcggctaccggtaactataaagttcgcatcgacaacgctactggtgccggttctgttgcggattacaaaggcaacgagctgatttatgtcaatgacgtaaacaccgacgcaaccttctctgcagcaaacaaagctgacctgggtgcttacacctatcaggctaagcaggaaggcaacactgtcgtgctggaacagatggaactgaccgactacgctaacatggcgctgagcattccttctgcgaacaccaatatctggaacctggaacaagacaccgttggtactcgtctgaccaacgctcgtcatggcctggcggataacggcggcgcatgggtaagctacttcggcggtaacttcaacggcgacaacggcaccattaactacgatcaggatgttaatggcatcatggtcggtgttgataccaaagttgacggtaacaacgctaagtggatcgttggtgcggcagcaggtttcgcgaaaggcgatctgagcgatcgtaccggtcaggtggatcaggacagccagtctgcctacatctactcttccgctcgtttcgcaaacaacatctttgttgacggtaacttgagctactctcacttcaacaacgatttgtctgctaacatgagcgacggtacttacgttgacggcaacacatcttctgacgcctggggcttcggcttgaaactgggttatgatctgaagctgggtgatgcaggctacgtaacgccttacggcagcgtatccggtctgttccagtctggcgacgactaccagctgagcaatgacatgaaagttgacggtcagtcttacgacagcatgcgttatgaactcggtgtagatgcaggttataccttcacttacagcgaagatcaggcgctgaccccgtacttcaaactggcttacgtttacgacgactccaacaacgatgctgacgtaaacggcgactctatcgacaacggcgtagaaggttctgcggtacgtgttggtctgggtactcagttcagcttcacgaagaacttcagcgcctacaccgatgctaactacctcggcggcggtgatgttgatcaagactggtctgcaaacgttggtgttaaatatacctggtaatcattttctctcaggagaaataaaggtaatttaaactgaaaaatgcccgtcaaggacttgacgggcattattgcaaggaatgcatatgttatctttaagcaagccactacaggaattctacagactcgataaatgcctttctaagcatggtacgcgtttcgagtttgttaacgataaagagattatctgttcacctgatgaaagtaatacccatacctttgttattttagagggggttgtttcgttagttcggggtgataaagttcttattggtattgtgcaggccccttttatttttggcttagccgatggcgtggcgaaaaaagaggcacaatataaattaattgcggagagcggttgcatcggttatcgcctctcatcatcacaaactctcgccatcattgagcagaaccaactgtggcgtgaagccttctgttggatagtatggaaaagtcaggtactggaacttcgtgacaagcagctcattggtaataattcttacgaccaaattcgtgcgacgttaatgacaatgattgagtgggatgaagaacttcgctcacgtattggtgttatgaattatattcatcaacgaacgcgcgtatcgcgatcggtggtggcggaagttctcgcggccctgcgtaagggtaattacattgaaatgaataaaggcaaactgatcagtattaaccgtttgccctccgaatattaacaaaaatgttgcgcctcgtctgatatagcgcgaggcgcgacgactcaggatgcaggaatagcaatcggtttattgccgcttagctcagtaaccaaatcgttaatcccgtcgctcatattggtaaaacgagtgaggggggaacgggttaccaccacaaaagcgccaatattatattgcgggatcatcgccatataggtaataaaaccgccgccgcctcctgttttctggataatgccaggacgtccgtcttttggcgccatatagacccaacccagaccgagcgcgtcggctttacccggtacgtccatcccgatgattttctttaactgtatgcgctgataaatcaacgtttgcatacgatcggcctgttggctacggtgatagaaatctgacgacagatactgttgcatccagcgcatcatatctcctggcgtagaatagaccccaccgctgccaatggctgccagcgtattattacaggggcttgcgcctttttctgccaccatcagacgcttacactgatcgggagaaggggtaaacgtggtgtctttcattcccagcgggcgggtaatcttttcttcaaacagttgcgtataaggtttgccggaggcggtcgccagcgcgtcggctaacaggtcgaacgccagattggaataggccgcctgtgaaccgggcgcgacttttaacgttgctgtggagagccagttccagcgttgttcgcgggttggccagacaaataccggacgatgcgccgcgccgccgggctgttctcgcggaagcgcgctggtgtgggtcgctaagttgaccaacgtaatcggcgtgccttgatacgtcgggacacgcgcgccgggaggcgcatatttgctgagaggatcgtttaattttaccgttccctgatcgagcaattttaccaacatttcactggtcatgagcttggtgagagaagcgatacgaatgaccgaatcaagctgtggacgaacattattgcccggtctggtgtcaccgaaactacgaaacacgcgttgattgccgtcgatcaccaccagcgccatgcccgtggcgccgctaccataaaagatatgctcggcataacgatcaacgatatcagaggcaaaaaccggatcggcaatcggctgagccgcctggacagaagtaagtgatgccgcaaacagcatggcagtaaaaagcagactacgtttcaacggtgatgtccataagtgaaataacggtggttatgcgtatttatactacccggcggcacattgcaaaacgttaaagagaaaaaagtgggtgaaaaaacgtaacggcgggttttcgtgatggagaatgtttacttttgtgatagagcgcttgtgataacctgatagcgtcagcgtgcctgctgtgtatgaaactcgtcgaaacaattctgttgagcagaaatgcgaactaagcgtcacaacgtaggtcacaatgcctggtttagccctttcatttgcgtgggcatggcgtgctattgccgccgtcacagcagccgtaataaagataagaagttagcaggagagcatgatgtttaaatcttttttcccaaagccagggccgtttttcatgtcggcgtttgtttgggcgctgatcgccgtcattttctggcaggcgggaggaggagattgggtggcgcgacttgtaggggcatccgatgaagtgcctatcagcgcagcgcgcttctggtcgctggactatctgattttttatgcttattacctgatttgcgtgggattatttgcaacgttctggttcatctatagcccgcaccgctggcagtactggtcgatacttggcacctcgctcattatttttgtcacctggtttttggtggaggttggcgtcgcggttaacgcctggtacgcgccgttctatgatttgattcaaacggcgctcagctcgccgcacaaggtcactcttggtcaattttatcatgaagtgggggtgtttctcggtattgcgcttatcgccgtggtgatcggtgtgctgaacaacttctttgtcagccactatgtatttcgctggcgtaccgcaatgaatgagcactatatggcgcactggcagtacctacgccatatcgaaggggccgcccagcgtgtgcaggaagataccatgcgttttgcctctacactggagaatatgggcgtgagttttatcaatgccatcatgacgctcatcgcctttctgccggtgttagtcaccctgtcagcgcatgtgccgaatttacccatcgtagggcatatcccttacggcctggtcattgccgccatagtctggtcattaatggggacgggcctgctggcggtcgtcgggatcaaattgccagggctggaatttaaaaatcagcgagtggaagccgcttatcgtaaggagctggtctacggtgaagatgacgccagccgcgccacgccgcccaccgtccgtgaactgtttagcgcggtgcgccataactactttcgtctctactttcactatatgtatttcaacatcgcgcgcattctctatttgcaggtcgataacgttttcggtttgttcctgctgtttccttccattgttgccggtacgattacgctggggctgatgacgcaaatcaccaacgtgtttggccaggtgcgcggttcgttccagtatttgattaactcctggacgacgctggtggagctgatgtctatttataaacgtttacgtagctttgaacgccagttggatggtcagccagttcaggaagtgacccactcttttagctaacagaaggaaacgttatgtcggcggcgtcccgtctttatcctctgccttttctggcggttgccatattggctggctgtagtagtcaatccgggcagccggtgagcaagggcgagaagcctgtcgacgtggcaagcgtagtacgtcagaaaatgccagccagtgtcaaagacagagaggcctgggcgaaagatatcgcgacaacgtttaagagccaggggctggcgccgacggtagaaaatatctgttcggtgctggctgtcgcccagcaggagtccggttatcaggcggatcctgtcgtgccggggctaagtaaaatcgcctggcaggagattgatcgccgcgctgaacgactacacatcccgctgtttctggtgcacaccgcgctgaaaattaactcccccaacggcaagagctatagcgaacgcctggacacggtaaaaaccgaaaaacagcttagcgctatttttgacgattttatcaatatggtccctatggggcagacgctatttggctcatataacccggtgcatacgggcggcccgatgcaggtcagcattgcctttgccgaacagcacgcgaaaggctatccgtggaagatgacgggtacggtacgtcaggaggtctttacgcgccgtggcgggttgtggtttggaacctaccatttgctgaattacccggcgaactacagcgcgcctgttttccgcttcgccgacttcaacgcgggatggtacgccagccgtaacgctgcgttccagaatgccgtcagtaaagccagtggggtaaaactggcgctggatggcgatctgattcgttataacagcaaggaaccgggcaaaacagagttagcggtacgcaaactggcagggcagttgggaatgagtgagcgtgaaattcgcagccaactggagaaaggcgatagcctggcgtttgaaaaaacggcgctctacaagaaagtctataaactggccgaggccaaaacgggcaagacgcttgcgcgggaaatgttgcccggtattcaactggaaagtccgaagatcacacgcaagctgacgaccgcctggtttgctaaacgagttgatgagcggcgggcgcggtgtatggggcgataaatttcgcgctgggatactttctccagcgcgctaaggtttattggtgacggtgacgccagcgtaaaaacgcggcgataacggcgaaaatgaggcagcccgtgaggaagggcaccaggccaaaaatcgtcccgacgcccagcccaatctctacccgcggtcgacctgtatcctgtacctgcatcagatgctcatagatgcccggcgcatgaaccagcaggtttaagagttgcgctccggcccagaagcaaaacagtacaaatatggcgtaagcaatatttccgggcgtagaggaggtttctcgatgcttcccgctgaacagcgattttgagagagtgaaatcagccataaagacctccaggatgatcggctacgatctggcgttatgccatcggcttactgtgaagtctgacaggtcattgtgtttgtcaatatcagaatcatggtaatttcacatacggaatgtatccatcgcgtaaatttttgttagttgtcacaaaacgatcacttttatcaaaatcaattaacatttaagaaattccgtatcccccacagactcgctcgccagaagtatgcaaaaatacgtttttgttactgttaatacgtcggagtcgttatgcgtttgcctgtaaaaattcgtcgtgactggcactactatgccttctctattggccttatctttattttgaatggcgtcgtaggattgctgggttttgaggctaaaggatggcaaacctatggcgttgggctggtaacatggattattagcttctggctggcggggttcattattcgccggcgcgaagaggatgaggtaaaagacgcccgataaacgttgcgctatcgggcgtgcgctattacatcgtggtttttaaggcgttattcgccgtatggcgttccagcgccagctcaatcagacggctgatcaaatcggtatagcccagtccgctcgcctgccagagttttggatacatactgatattggtaaaacctggcagcgtattgatctcgttaatcacgacctcattgtctgccgttaagaagacatcgacacgcgccatacccgcgcatcccagcgtctgataagcctggatcgcgatcgcgcggatcttgtcattcacctcggaagggatctgcgcaggcacgacaacttgtgcgccattatcatcaatatacttagtatcgtaggcgtaaaattcgctgttcagtacgatttcgccgcaggtactggcctgtgggttatcgttacctaatacggcgcattcgatctcgcgccctttgatcccttgctccaccaccactttatgatcgaattcgaaagccagcgcgaccgcctgctgatattgcgcttcgttagcgactttactgacgccgaccgaagagccctgattggcgggcttaacgaacagcggcagtcccagacgggattcaacctcggcaaaactaaacgcgtgacgattcgttcgggtgagtgtaataaacggggcgatattcagtccggcatcgcgtagcagtcgtttggcgacgtctttatccatgcaggctgcggagctcagcacgtctgaaccgacaaacggtaagtttgcgacgcgcagcatcccctgcaatgagccgtcttcgcccagcgtaccgtggacgataggaaaaataacatctaccgtcggtagcggctgcccgttctgagcgttaatcaattggtgttggtgtttgccaggcacctgggccagactgattgccgaaggacgtagcgcgatatgtgccggatcgtctgcattctgcaaataattttccgcatcgttaacatgccattgtcccgccttatctatccctaacagcaccacgtcgaagcgggttttatcgatcgcatcaacgatatttttcgctgattgcaaagacacttcatgttccgccgacttaccgccaaatactattcctacccgcaatttcgccatcttaaaaacccattccatcgaatgcaaagcgtatacattaccacgacaaaacgcgggtttcgcgggcttctgccataatgtttatgggatgtgagaacggaggccgcgtgagaggtaagggttttctgattattgtgctgttgggcggcattggcgggctgggatatcgttatcttccctcttattataatccttttgctccgctacaacttgccgatccgccaggctggatcactaccttcaaactacagcgcctgacgccgtcgcagtgccgggagcttttgacggcggccaatcaacagggattaatttcatcacaacctgttgcggatagcgctggtgaatgtcccttatcccatgttgtgcgcgtcagagattttggccaggtaaaactgagcagcagttttttagcctcctgcccgttggcgctgcgctccgcgctgtttgtcgaacagcaggcaaaacctttaacagaaacgtggatgaagcgccgcctgacccgtatcgaacatctgggcagctatgcctgccgtaatatttatcaccgcccggatgcgcgtcgcagtgaacatgccagcgcagaagcgctggatgtcagcgggtttcagctatcggatggccgaaaaatcactgtcctgcgcggctgggggcgtcaggagacggggccctggttacgcgctatgttaaacgccagttgccattattatggcaatgggctcgggcctgactataacgctgcgcatgctaaccattttcatcttggaatgcggggctacggcgtgtgtcgttaaagcataaacgtctgccttgcgcggctatataatgtgacatgtttcacaaaaatgatgaacggggagacaaaatagcaaagtgtgacgtatcgcacctctggaaccaccaggaaaaagagaacttgctaagctaacgcgtattttcagctacttaccgttacgagtcttatggaatcctggaaagttaatctaatttccgtttggtttggatgtttttttaccgggctggcaatcagccaaatcctgccattcttacccctttatatttcccagcttggcgtctcttcccatgaagcgttatcaatgtggtccgggttaacgtttagcatcacgtttcttatttccgccattgtgtcgccgatgtggggcagtctcgccgatcgtaaagggcgtaaactgatgctattgcgcgcgtcgctcgggatggcgatagctattctactgcaggcatttgcgacccatgtctggcaacttttcctgctgcgcggaatcatggggttaacgtcaggctatatccccaatgccatggcgctggtagcctctcaggtaccacgcgaacgtagcggctgggcgctcagtacgctttctaccgcgcagatcagcggcgttatcggcgggccgttaatgggcggctttgtcgcggatcatatcgggctgcgggcggtatttctgattaccgccatgctgttggtggtgagctttctggtcacgctatttttaattaaagaaggcgtgcgtccggtcatcaagaaaagcgaacgcctgagcggtaaagccgtttttgcgtcgttaccttatcctgcgctggtgatcagtttgttttttaccacgatggtcattcaactctgtaatggttccatcagtccaatcctggcgctgtttatcaaatcaatgatgccggacagtaataacatcgcctttcttagcgggttaattgcctcggtgcccggtatctctgcgcttatctccgcgcctcgcctgggaaaacttggcgacagaatcggcacggaaagaattctgatggccacgcttatctgcgcagtgctgcttttcttcgcgatgtcctgggtcaccacgccgttccagctggggctgttacgtttcttgttaggctttgccgatggcgcgatgttacccgccgtacaaacgttattggtgaaatactccagcgatcaaattaccggacgtatttttggctacaaccagtcatttatgtacctgggcaacgtggttgggccgttgatgggcgcgacggtatcggcgatggccggtttccgctgggtttttatcgctacggcggcgatcgtgttgatcaatatcgggcaactgaccctggcgttacgtcgtcggcgtaacgcgcaaaaagcgaaaggccaatagcggtgcatcgtaacggcgcttctgccgttacgatatggtttaaattaaaagatatattctttatccgtgaagtttttctatagatggcataaccttaaattatgatatagcgtgattattgttttttgatggtttattatcgtctcgttttcggtctgagaaacgtttcgctgcggcgacagtgataattatttgtgtaaagttcttcctgtatcataaaaatagtactttcagcctctaggcagtggttcttcatagtgataacgtcaccctggaactaataaggaaatatggtcatgaaaaatctcatagcagagttgttgcttaagctagcccaaaaagaagaagagtcgaaagaactggttgctcaggtagaagcgttagagattatcgtcacagcaatgttacgtaacatggcgcaaaacgagcaggagatgttgatacgtcaggtagagggggcacttgaaggcgtaaagccggatgccagcgttcctgatcacgatacggaattgctgcgccaatatgtaaaaaagttgctgagacacccccggcactaatcgtatttaaaacaacacagttgttataacgttacttttatgaaataacatagccgcttcgtttttattttcttctgggtaatacagagcaaaataaaaacgaagcggctatggtaataacagtgtaacgttatgcgctgttcttctgcatcctgccagtgtaactgtggataatcgaattgcacattagcctacggtttgtcaatcaataaaacatctattgctaacggtaagtaatacttttacagccgggtggtatttttgccagtaacagccagacttatataaagtccctgggatatttcccaaagggacaacgtgtaatgtgtacactgacaaaaggatggtgctatgaaaataacattactggtgactttactttttggcctagtctttttaaccgccgtcggcgcaaccgagaaaccgttaacgccgcaacagcagcgcatgacgacctgtaatcagcaggcgacagcgcaagcgttgaaaggcgatgcgcgtaaaacctaccttagcgactgcctgaaaaacagtcagtcagcccctggcgagaaaagcctgacgccgcaacagcagaaaatgcgtgaatgcaatgttcaggcgacggaacaatcactgaaaggcgatgaccgtagcaagtttatgagcgcctgcctgaaaaaagcggcgtagtgctatcgggtgagtcctgaaaaacactcacccgaaatttcatacttcctccatgcgctctgtttctataatttgggaaaattgtttctaaatgttcccaaaaataatgaatgatgaaaatttttaccgaaaagcggttgaacaggcggtagcgccgcctgaccctcctgatgatcgtcagcgctccgggttgcgcttcgcccggcgcatcaggctaccgcgtgcggtggggttaggggggatgtttttaccggtggccgccgtgttagtgacgcaacctgtctttggcggctggtggctattgctggtcggctggtcttttgtctggccgcatctggcatggcagtgggcggcgaaagcccttgatccgctacgccaggaaatttacaacctgaaagtggatgcgatcctctccggcatgtggatcgcgctgatgggcgtcaatatgttgcctgccgccgcgctgtttatgatgatgagcatgaatctgatgggcgctggcgggcggcggctattcactgtcggaatgggccttttgctggcgtcatgtctggtgacgttgcagcttgccgggctacccgtcgcgatgcgaagctcgtcgctggaagtcacgctctctttgcccgtcattatgttgtatccgcttctgttcgcctgggtaagttaccaaacggccattaaattagcggaacataagcgacgcttgcaggcgatgagctcgcgggatggcatgaccggcgtctataaccgacgccactgggaaattttattacgtaatgaattcgatcacagccgacgccaccatcgggaggcgacattgttgattatcgatatcgatcattttaagagcattaacgacacctggggacatgatgttggggatgaggctattatcgccctgacgcgtcaattacagataacgctacgcgggagtgatattatcgggcgctttggcggcgacgaatttgcggtgattatgtgcggaacgccggcagacagcgcgattaccgccatgtcgcgagtgcatgaacggctaaataccttacgcttgccgggcgcgccgcaggtcatgttacgtatcagcgtgggcgtggcgccgttaacgccacaaatcggtcattatcgggaatggctaaagtctgcggatatggcgctttacaaagcaaagaatgccggacgtaaccgcaccgaagtggcggcatgacgtccagccgggcttcaggatttactgagcgcctctgatttttccatacacttcgtcatcgcttctattaccgcagcgcggaagccacgttcttccagaacgcgtacggcttcaatcgtcgttccgccaggcgagcacaccatatctttcagttcgccgggatgctttccggtttcgagtaccattttcgccgaccccatgacggcctgcgcggcgaatttataagcctgagcgcgaggcataccgcccagaacggcagcgtccgccatcgcctcgataaacataaagacataggccggcgaagatccgctcacgccaaccaccggatggatcatcggctcagcaatcacttccgccccgccaaagcagcggaaaatattcagcacatcagccgtatcttccggtgtgaccagcgcgttgggcgtgacggaggtcattcctgcgttgaccagcgacggcgtattcggcatagcgcgaatgattttacggtcgtgtcccagcgcgcgcgcaagctgatcaagcgttacgcctgcggcgatagagaccaccagcgagtctttgttcaggctggaggagatttcactgagcactttcaccataatgcccggttttaccgcgccgaaaacgatatccgcgacctgagtgacctcctgcgcgctttgcgccgcattaatgccgtactgatcatgcagggcggcgactttatcgggggagggggtatagacccagatctggccgggaagtacctgaccgctggcaatcagtccgccaagaatagccttgcccatattaccgcagccaataaaaccgattttcttctccatctcgtcactccctatgtttgtgtgttatggggaatggttagcttaacgcggattgaaaacgggcagaaggagaaacagcactttgatgaaagacaaaagcgcgagacaataaaagattgtataccgtacgggagacattatgaccatctgggtggatgcggatgcgtgtccgaatgtcattaaagaaattttgtaccgcgccgccgagcggatgcagttgccgcttattctggttgccaatcaggccttgcgcgtgccgccttcgcgttttatccgcacgcttcgcgtggccgccgggtttgacgtggcggataacgaaatcgtgcgtcaatgcgaagcgggcgatctggtgattaccgcggatattccgctggcggctgaagtgctggaaaaaggcgctgcggctcttaatccccggggagaacgctatagcgacgccacgattcgcgaacgtctgacgatgcgtgactttatggacacgctacgcgccagcggcgtacaaacgggggggccaaacactctctcgccgcgcgatcgtcagcattttgccgccgagctggataagtggtggctggaaagccagcgtaaaaaataaatcatgtaatgaaaaatttacagtttattcatttctgattcttgctatagtactaatattgtgactttagtacctttgtgtaaattattatttacatttatgcgttgtactagttagatgatatgattataacattgctgatatcaaatcctgcgtatgcgcagttcctgggggaacgcctgctatgatgcaacctctttatcttgttggcccgcggggctgtgggaaaaccaccatcggtatggcgctggcgcaggcaaccggttttcggtttgcagataccgaccgctggctgcaatcgcacgtgcagatgagcgtcgctgatatcgttgaaaaagaaggctggggagggttccgcgcccgggaaaccgcggccctggaggcggtaagcgcgccttcgactgtcgtggcgacgggaggcggtattattctcacggagtataaccgacgttatatgcaccgtgttggcgtagtgatttatctgtgcgcgccggtatccacgctggttaaccggcttgaggctgaacctgaagcggatctgcgcccgaccctcaccggcaagccgttgagcgaagaggttcgggaagtgcttgagcagcgtgacgcgttgtatcgcgaaacggcgcattacattattgacgcgacgaaagcgccggcccaggtcgtttctgaaattattgcggcgctgccgccgtcgacgcaacggttacagggagatgtctatacttaacgctcacccagaataaaggaaacgctatgccaaccagaccaccttatccgcgggaagcttatatcgtcaccattgaaaaaggcacgccgggccagacggtgacgtggtatcagctacgggctgaccatccgaaacctgattcgctcaccagcgagcatccgaccgcagaagaagcgatggatgcgaaaaatcgttacgaagatccggataaatcatagacgcatgaaccactcggaagggattctgagtacccctaaattgtatctccatcacattcttgaaacatttatactggcaactaaaaccgtaaattaagcgataacaatacaatattggagttatttggaatctttacacaatacgttgctcatctgctgctacgctttctgagatttgtagggcaggtagcgcggtgagcgtgtgaatatttgcccgggaattacgacgaagtaataaggtggaataaaaatgagtgcgtcgttggcaatcctcacaatcggcgttgtgccaatgagcgaagtgttaccgcttctgacggaatacatcgacgaacaacacatcacccatcatagcctgctgggaaaaatgagccgggaagacgttatggcggattacgctgtagagcctggcgacgatccgcttttgacgttgctgaatgataaccagatagcccatgtttcccgccagaaagtggagcgagatttacagagcgttgtcgaggtgctggataatcagggttacgatgtcattatactgatgagcaccgcggcgattaaaagtatggcagcccgtaattctattttgcttgaaccgctgcgtattattccaccgcttgtcgcctctattgtggatggacatcaggtgggcgtgattgtgcctgttgcagaacttctggcggcccaggagaaaaaatggcaggtattgcaaatgccgccggtgtattcgctggcgaatccggttcacggttctgagcaacagttaattgatgccggacaggcgctactggatcaaggcgcggacgtcattatgctggattgtctgggttttcatcagcgtcatcgggatattttacagcaggcgctggatgtgccggttttactctctaacgttttgattgcgcggttagcttcagaactgcttgtctaattttacgtgacaggccgaacgtcaggactctatattgggtgttaatttaataatgagacggggcctgattatgctacaaagcaatgaatacttttccgggaaagttaagtctattggatttaccagcagtagcaccggccgggccagcgttggtgtgatggcggaaggggagtatacatttggcaccgccgaacccgaagagatgacggttgtgagcggcgcgttgaaggtactgttgccgggaactgtcgaatggaaagtgtatacagccggtgaggtgtttaacgtgcctggccacagcgagtttcatctccaggttgctgagcccgcctcgtatctgtgccgctatttgtaacggtgagtcccctctccggcggagaggggccctctggttagcgctgcgcttcgccgcctaatccttccaccaggctttgaatcagcgccgccagctcgccggtcatcaggataaagtccgcgtcaaaacgttgggcaaaatcttcccggtcgatatcttcgttctggtcgcgcagctcatcgcagaatttcagacgcttaatggagccgtcatcgcacatgacgaattgaatgcgctgctgccagtcgagcgccagcttcgtgaccactttacccgcttcaatatgaacggcgatctcgtcgctgaccagatcctgctttttcgcgcggatcacgccgccatcttccagcatcgctttcaattcggcttcgtccagcaactggaaaccctgagcgaccgtaccggagcgcacccactcggtgagcgtcagctcaatcggattttccagcgccagcgggacgaccggcagcgagccaagacttttacgcagtagcgccaaagtatcttccgcttttttcgcgctggcgcagtcaaccataatcaggccgttaacggtatcaatccacatcattgtctgactgaagcggctaaacgcgcgcggcagcaacgaatgcaacacttcatccttcagggaatctttttccgtcttcttcagcttgcgtccctgatcggcttccagtttctggattttcgcctccagtgcctgtttgatcactggcgatggcaggattttctcttctttgcgcgcgcaaataataatttggccattggcggtgtgcgttaacgcatcgctgtgagagcccatcggcggaacccagcccattttggccatatcctggctaccgcatggggtaaacgtcattgaggcgagctgtttctccatctcttcggcgcgtaatgtaatatcgcggctaagacggtaaaccattaaatttttgaaccacagcatgataatttccacggccttgtcgttaaatccaggcggtatagtaacgaattgtcggcaggcttgcattgccaatcagaacggtgaattctaccctgttgatattcccaaaaaatgaggagcggtatgtgcgtattggtatcgatttaggcggcacaaaaacggaagtcattgcgcttgatgatgcaggagagcagcggtttcgccatcgtctgcctacgccgcgggaggattatcagcaaacgatagaaaccatcgctacgctggtcgacatggcggaacaggcgaccggccagaccggtagcgtcggcattggcattcccggttctctctcgccttacaccggcgtggtgaaaaacgctaactctacgtggcttaacggccagccgttcgatagcgatgtgagccgtcgtctgaagcgtgaagtgcggttagccaacgatgccaattgcctggcggtatcagaggcggtggatggcgcggcggcgggggcgcaaacggtatttgcggtgattatcggtaccgggtgtggcgcgggcgtagcgctaaatggccgggcgcacatcggcggcaacggtacggcaggtgaatggggccacaatccgttgccgtggatggatgacgatgagttgcgttaccgcgaagaaattccctgttattgcggtaaacaaggctgtatcgaaacctttatttccggtacgggatttgccacggattaccagcgtttgagcggtaacgcgctaaaaggcgatgagattattcgtctggtcgacgcgcaggacgccgtggcggaactggcgttaagccgttatgagctgcggctggcgaaagcattatctcatgtcgtgaatattctggatccggatgtcattgtgctgggcggcggtatgagcaatgttgagcgcctgtacaagacggttccgtcgctgatgaaatcgtttgtttttggcggcgagtgcgagacgccggtacgtaaggcgcggcatggcgattcgagcggcgtgcgcggcgcggcctggctgtggccgctggcgtaacgttgttagccggatggcgcgtcatccggcaaccggcgtgaccgatggctgcttgtgttttagacgtccgtataccagcaacgacgacatggcggaaaacgagagcagggcggcgggaagcgccacatagtggtacgcaaaacctagtgtcagcatcagcccgccgcaccaggcgccaatcgcgctaccgagattaaacgcgatttgccctcccgccgcgcccagcagttcgccgcctttggcgttttgcagtagcaggatttgcagcggcgcagagagcgcaaacagaccagcgcagcagataaacgcgaaagtcagcgatgtcgttttgtatccgctgaagaaaaagagcgccatgagagaaagcacgataacgaggtcagtcactaccgcgatgcgcagcggagtatatctgccggagagtttgccgcttaacagattgcctaacaccatccccagcccgaccagcatcataataaacgtcatgctcgtctccgaaaaaccggagatgtacatcataaatggcttgatatagctgaaccaggcaaaaacgcccgcattgccgaacatcgtggcggcgaaaatgagccacggcgaggggctacgcaagaagtgaaactgctcgcgcaggctgccttgggctttgtcgcgaatatccggcacccagaagaaaattgcggtgagcacggcgatgttgaaaaccgcgatcaataaaaaggtgtagcgccagctaaattcctggctcaggtaagtgccgaacggaatgcccaccagattcgccaccgtcatccctgaaaccatacccgcgacggcggcggtgaccttcccggggcggataatctttgacaagacaatggcgccgacgccaaaaaaggcaccgtgcggaaagccggaaaccagtctgccgacggcgagcatcagatatgacgaggaaaaggtaaatatggcattgcccatcacgcacaacatgaccagaaacaacagtatatgtttaagcgaaaagcggctggaaaagagcgccataacaggcgcgcccagcacgacgccgaaggcgtaaaacgagatcatatgcccggcggcgggaattgttatcccgacatcgcgtgccagctccgtcagcacgcccataatgccaaactcggccatccccagtccgaacgtacccagcgccaaagaaaaaataacttttttcataccacctgccgaaaataaaggcgcatgttgcgcgctgtggctgtgaattgtcacagccaatcaacgtatagcttgcggataagcgcgaggtaataccattccttatccgtctttgtgtattcattattatgctatgtcatgacggtatgctgtgcgcaggatgacactcgtgttactccacggcaaacgctttgtccagtttgctataaccaagcccattgatttttttcacttttatctgcacagggatacgttctttcatggcttccacgtgactaatcacaccgatggtcttcccgctggcattcagcgcatcgagcgcatccagcgcggcgtccagcgtttcgctatcaagcgtgccgaagccttcgtcgaggaacaaagaatcaatgcgcgttttatggctgaccaaatctgataacgccagcgccagcgccaggctgaccaggaaactttcgccgcctgataacgttcgcgtatcgcgcacggcgtcggcctgccaggtatcgacaacctccagttccagcgcgtcgctggctttgcgctgcaataaatagcggccatgcaggcgggtgagttgatgattcgccagccagaccagattatccagcgtcagtccctgggcgaatttgcggaacttatcaccttctttagagccgatcagcgcattgagatagccccagtcttccacttgctgagaggcttgcttcatttccgtcatcagcgcgcgttggcgctgccgattatctgcatcctgtttaatttgctggcggatttccccctggcgtgtcgtgttctcgcgcagttgttgcgccaactgcgtcagccgctgcgcgagctgctccgccgtacacgttgggtccagacctgcgggcggctgttgctgatggtcagccagcgcctgcgcggactgcgcgcttaacgccttcgcttgttgtagctgactttccagcgtttgttgttgtttttccagacgggtcacggtctcttcatccagcaacgccgccaggaacgttgcctggctgtcaaacgggctattttttaacgccgcatcaaagtgcgctatcgcctcggcggcgcgctgctgctcctgcgtcgtttgttcctgcagggtttgcaactggctttgtaatgacacgcactcatcatgcgcctgccgccagttatccagcggcacgtcgtcgtcggaatccgcggtatccgtttgcggtagcgtctccagcaacggggcaagcctgtcgatctgcatttgcaaatccgcgaactctgtctgacgctgttgccatattttcgcttcgtcggcgcgctcattcagccacgaagcctcgtcttctggcgcaggaagggaaagcgtatactgcgccaaatctgccgtcagcgacgcctgacgctgcgcaatctgcgcggtaaagcgcgctacctgttcagtatgcgccgcgatttgcgtttgtagagcatgacgctggctgagctgatccaactgttgctcatgctcttccgcggcggtcagccagcccgcgaggtcttcttgcggctggagctgaacgcccagcgtagcgcacagcgtttgccattcctcagtaagcgcttgctcctcctgcaacaacgactgcgcctcgctttcatcccgctgtaattgttgcgttaaggcatctaactgtcctcgcagcgccgcgccttcttccgccagcgttttgacctctttttccagcgcgtcgcggcgggtttgattcgcgctcagttccagcgcctgataggcggcgatggcggggtgcgtcgtcgagccgcaaagcggacacggctggccggactgtaagtgcgcccgctggctttccagatctttgatgcgcgcctcctgctcgcaaatagtgcgaacgtccgcaagctcctgcgctttagtcttataactcaaacgcttatccgccagacgttgggtgtattgcgcctgctcctgatgatgacgcgcgatagctgcctgtagctgcgcctgacgcttttgtttcgggagaatttgcccctgaagcgcggcgagacgatggcgtagcggacgctgccgggtatgcaatgctctggcttccgccagcgcctgtggcgtgaggtcgagcgtgagcggcggtagcgcatcacgctgacgcgtatcgctcagcaactgctgttgccattggctcagttgcgcccgatcgtgggattgttgtgttaataatgctcgccaccccgccagttcgctgcgccagacgcggatgccgtcgtgttccgccagccatgtcttcaaccgctgccctgtggcgttcagttgcgtgaattgtcgatgcgcgcaggcgcggatacgctggcgcaggcgatacgcgctttgtaagcgagcattcacttcatcactgtgctggcgaacacgctcaacggcgcgggtttgttcctgaatgcgctcccagtgcgggcgcaactggcgagcaggttgcgccagtgtcaacgccgcgagctgcggctgcgctttttctcgcgcctcttgcgccgcgtacagcgcctgctgccgggcgtgtaattcagtgtggagctcgttttttcgggtcagccagtgaaggtgctgctgctgtccctgctggtcggccagcaggcgtttctcttcgtcagtaagcgcctgcaaactggcttccagttgctgtaactgttcgtccgccaatagggcgacgccgctggcctgcgcttgtaacttttccagttcgagacgggctgatttatgtttttcaaatacctgtgcggagatctgcccgtaaatctcagtgccggtgagctcctccagaagctctgcgcgctctttcgctttggcgttaagaaaggcggcgaactgcccctgtgataacaacatcgaacgggtgaagcgcccgtagtccagcccggtcaacgtggcgatcatctccagtttatcctttaccttatcggcaaagatctttccgtctgaacaccgtgccagctctacgcgtggggcctggagattgccgtcaggctgatttcgggctcggttctggctccagaacgcgcgccaggcttcgccttttacctcaaactccacttcggccagacattccgctgtatcgcgcgtcatcaaatcgttttgcgattgcgataccgtattcaggcgcggcgtttcgtggtacagcgccaggcagatggcgtcaagcaaggtggtttttcccgcgccggtcgggccggtaatggcgaataacccgttactggcaaacggttcggcggtaaagtcgaccttccattctcctttcagcgagttcaggtttttcagacgcaaactgagaattttcatgcctcatgctcctcattcaacgcgtagagcgtgctggaaaagagctgattcaggcgctcgcgctgcgggggatctaacgcttccagcgccagacgccgcgcaaaaacctcctccacgctaagctcgcttaatgtttcccgccgctcgttcgccagcgagcgctcgcgctgttcgcggctacggcgcaccagtaatacctctacggggagtgactccgttaatgtctgtattctgcgttggatatcgtgcagataatcatcggtggtgatttcaatatccagccagacggggggcgattgctcaacgccgcgccactgctcaagctgttcggtaattgacgccaggtcgccttttaaaaccgccagcggttgagtcacggggacagccagactttcggtactttgccatttcccctgctcgaaggtcaccagatgcacgcatttgcttttgccgcactcatcaaagctgagggcgatgggtgagccgcaatagcggatatgctccgtgccgccgacacattgcgcgcggtgaatgtgtcccaatgcgatataatccgcgggggggaaatgctgcgccggaaaggcatccagcgtaccgatataaatgtcgcgaaccgcatcgcttttgctggcgccgacggtggttaaatgtcccgtcgcgataaccggcagctttcgttcgccgcgtagttggcacgcttcctgatactgctgttgataataatcggcaatcgcatgaagaagttgctgctgtttctcgctgccggataatcccgcctgactggtaataatgtcgcgcgggcgcaaaaagggaatggggcacagtacggcgcccggagacccgtcgcgacgatgaagtagccgcggcgcatagcccgcgctggcgatcacggttgtattgagaaacgccagaatgtcgcgcgattcgtttagcgtggcgacggaatcatgattaccggccagcaccaccagatgacagcccgtttgctgtaaattaacgacgaaacggttataaagttctcgggcatagcttggaggcgaaccggtatcaaaaatatcgccagcgacaataatggcatccacctgatgggcctgcgcggtctccagcagccagtccagaaaagcctgatgctccgcggcgcggcttttactgtagaaattttgtcccagatgccagtcagaggtgtggaggatgcgcataattgttccatgcaaaaaaagcgtgaacgggattatacacgtcatcccttccatttttgggcgcaatttaccgccggtacacggtaatgcatggtttcaccggtgtcataaatcatcaacatgctgtcaatgccgcctttttttttcataaatctgtcataaatctgacgcataatggcgcggcattgataactaacgactaacagggcaaattatggcgagacgtattctggtcgtagaagatgaggcgccgatccgtgaaatggtgtgcttcgtgctcgaacaaaatggctttcagcccgtagaagccgaagattatgacagtgcggtgaataaacttaatgaaccctggccggatctcatccttcttgactggatgttgcccggcgggtcagggttacagtttattaaacatctcaaacgtgaagccatgacccgggatattcctgtggttatgctgaccgcaagaggtgaggaagaagatcgtgtgcgcgggctggaaaccggcgctgacgattacattaccaagccgttttcccccaaggagttggtggcgcgcattaaagccgttatgcggcgcatctcgccgatggcggtcgaagaggtgatcgagatgcagggactgagccttgatcccggctctcaccgcgtgatgaccggcgacagcccgctggatatggggccgaccgaatttaaattactccatttctttatgacgcacccggaacgggtttacagtcgcgagcagctactcaatcatgtctggggcaccaatgtgtacgttgaagaccggacggtcgacgtgcatattcgccgtttgcgtaaggcgctggagcacagcggccacgaccggatggtgcaaacggtacgcgggacagggtatcgtttttcgacccgcttttaatgccttttccgccagtagaacacaggtttctggcggagaaggctttccattcttgagggagtatgacgcgtgctggaacggctgtcatggaaaaggctggtgctggagctggtgctctgttgcatccccgcgcttatccttagcgctttttttggttatctgccgtggtttttactggcggcggtgacgggactgcttgtctggcatttctggaatttgttacgcctctcctggtggctttgggtcgacagaagtatgacgccgccgccgggacggggaagttgggaaccgctgttatacggtttacaccagatgcagttgcgaaataagaagcgtcgccgcgagctggggaacctgattaaacgttttcgcagtggcgcggagtcgctgcctgatgccgtggtactgaccacagaagagggcggcattttttggtgtaacggtttggcgcaacagatactggggctacgctggccggatgacaacgggcagaatattctcaatctactgcgttatccggagtttacccagtatttaaaaacgcgtgatttcacccgtccgcttcatttggtgctcaataccgggcggcacctggagatccgcgtcatgccttataccgataaacaactcctgatggtggcgcgcgatgtgacgcaaatgcatcagcttgaaggcgccagacgtaactttttcgccaacgttagccatgagttgcgtacgcccttgacggtattgcaaggctatctggaaatgatgcaggaacaggcgctggaaggggcgacgcgagagaaagcgctgcatacgatgcgcgagcaaacgtatcgtatggaagggctggtaaaacaactgcttacgctgtctaaaattgaggcggccccggcgctgttattaaatgaaaaagtggatgtaccgatgatgctgcgggtcgtggagcgtgaagcgcagacgctcagccagcagaaacatacctttacgtttgaggtcgacgatagtcttagcgttctgggcaacgaagagcagctacgtagcgcgatctcaaacctggtgtataacgcggtaaaccatacgccggcgggaacgcatattacggtgagctggcgacgtgtcgcgcatggcgctgagttttgcattcaagataacggtccggggattgctgccgagcatattcctcgtctgaccgaacgcttctaccgtgtcgataaagcgcgttcgcggcaaacgggcggcagcggcctgggattggcgattgtgaaacatgcgttgaatcaccatgaaagccgccttgaaatcgacagttcgcctggcaaaggaacgcgatttagctttgtgctgccggaacgtttaattgccaaaaatagcgattaattgcctttcgtaagtataactttccataagccagcggatgctggcttattttctttgcagttaagacgggctcgttgaaacattcaacgtttggtggttttttgttcgcatgattagccataactttttcatgagaatggtgttttattctggttgtaaatttcatatcgctatattcatctggtttttagatcccatcttgctttaaaacgttataagcgtttaaattgcgcttcaggtgctgtcattacgactgcatttgcgcggtaaatcgaaaaacaattcttcgccgcatcggtccgggagcttttcccgctgaaattgataaaaaacgccgctttataatcctccgggaaaggcaaaaattttaatgtttacaacatcaccatccacaggcagtaagactttatgacccatcagttaaaatcgcgcgatatcatcgccctgggctttatgacatttgcgctgttcgttggcgcaggcaatattatctttcctcctatggtcggtttgcaggcgggtgaacacgtctggacagccgctattggctttctgattaccgccgtagggctaccggttcttactgttgtggcgctggcgaaagtcggcggcggcgtagacagcctcagtacgccgattggtaaagtggcgggactcctgctggcgaccgtttgctatctggccgtcgggccgttatttgcgacgccgcgtaccgcgacggtgtcgtttgaggtcggtatcgctccgttgactggcgattctgcaatgccgttgctgatttacagcgtggtctatttcgctatcgttattctggtttccctctatccgggtaagctgctggatacggtagggaatttcctggcgccgttgaaaattattgcgctggtcatcctgtccgtcgcggctatcgtttggcctgccggtccaatcagcaacgccctggacgcttatcagaatgcggccttttctaacggatttgtgaacggctatctgacgatggatacgctgggcgcgatggtgtttggtatcgttattgtgaacgcggcgcgttctcgcggcgtgaccgaagcgcgcctgttgacgcgttacacggtctgggccggcctgatggcgggcgtggggctgacgctgctttaccttgccttgttccgcttaggttctgacagcgcgacgctggtcgatcagtcagcgaacggcgcggcgattcttcatgcctacgttcagcatacctttggcggcgcgggaagcttcctgctggcggcgctgatctttatcgcgtgtctggtgacggcggtggggctgacctgcgcctgcgctgagtttttcgcgcagtatattccgctgtcttaccgcacgctggtctttattctcggcggcttctctatggtggtgtcaaacctcggactgagccatctgattcaaatctccattccggtgctgacggctatctatccgccgtgtatcgcactggttgtattaagttttacccgctcatggtggcataattccacccgtatcatcgcgccggccatgtttatcagtctgctttttggtatccttgacggcatcaaagcatctgccttcggcgatatgctgccagcctggagtcagcgtttgccgctggcggaacagggactggcttggttgatgccaacggtggtgatggtgatcctggcgattatctgggatcgcgcggcgggtcggcaggtgacctccagcgctcactaaaatcgctgacatatgtgtacaccacggggcttaacgccccgtggttttttattgtgttgataggtcagaaattgatggaaagcaataataagctaaagcgtgggctgagcacccggcacattcgctttatggcattaggttcggcaatcggcaccggcctgttttacggctcggcggacgccatcaaaatggcggggccgagcgtgctgttggcctatattattggcggggtcgcggcatatatcattatgcgcgcattgggggaaatgtccgttcacaaccctgccgccagctcattttcgcgctatgcgcaggaaaacctcggcccgcttgcgggctacattaccggctggacctactgttttgagatcctgatcgtcgccattgccgacgtgaccgcgttcggcatttacatgggagtctggttccccgccgtgccgcactggatttgggtacttagcgtggtgctgatcatttgcgccatcaacctgatgagcgtcaaggtgttcggcgagctggagttttggttctccttcttcaaagtcgccaccattattatcatgattgtcgcgggtatcggcatcattgtgtggggaattggcaacggcgggcagccgaccggcattcataacctgtggagcaacggcggcttcttcagcaatggctggttgggaatgatcatgtcgctgcaaatggtgatgttcgcttacggcgggattgagattatcggtatcaccgccggggaagcgaaagacccggagaaatccattccgcgcgccattaactcagtaccgatgcgtatcctggtattttatgtcggcacgctgttcgtcattatgtctatctatccgtggaatcaggtcggcacaaacggcagtccatttgtgctgacgttccagcatatggggattacctttgccgccagcattctgaactttgtggtattgaccgcctcgctttccgctatcaactccgatgtgtttggcgtaggccgtatgctgcatggtatggcggagcaggggagcgcgccgaaagtctttgctaaaacgtcacgccgtggtattccgtgggtcactgtgctggtgatgacgattgcgctgctgtttgcggtttacctgaactacatcatgccggaaaacgtcttcctggtgattgcttcgctggcgacgtttgcgacggtatgggtatggattatgatcctgctgtcgcaaatcgccttccgtcgtcgtttaccgccggaagaggtaaaagcgctgaaatttaaggtgccgggcggtgtcgtaacgacgatagcgggtctgattttcctggtcttcattattgcgcttatcggctaccatccggatacccgcatctcactgtatgtgggcttcgcctggatagttctgctgttgattggctggatatttaaacgccgtcgcgaccgtcaattggcgcaggcgtagtcgtttttctctgccttatccggtctgcaggcaacggtagaccggataagcggagccgcttctcctcctggagcctcctcccctaataaacccctggatgatgagttatcctttaaatctctgtggcaaggtggccccattttcagtagaggggatacgagatgttgaatgcctggcacttaccggttgccccatttgtgaagcaacataacgataaattaaccattacgctgtggctgagcggagaaaatccgccgtctcgcgtgacgttgcgctcagaattcgataatgaagaaatctcactggcgatgcgcaaacagcgccgccagccgcagccgggcgtgacggcgtggcgagcgacgctcaatatcgcgttagggcaaccccgtcgccgttacagctttaaattgctttggcatgaccgccagctttggtttacgccacagggatttagccgttttccgcctgcgcgtctggaacaatttgcggttgatgtgccggatagcggcccgcagtgggtcgccgatcaaattttttatcagatcttcccggatcgttttgcccgcagccagtctcgtgaagccgggcaggaccgggtgtactaccatcatgccgcaggtcaggagattgtgctgcgcgactgggacgatcctttaaccccccaggcgggcggttccaccttttacggcggctgtctgaatggcatttgtgagaagctgccgtatctgaaaaaactgggcgtcacagcgctatatctgaatccggtatttaccgcgccgagcgtccataagtacgatacggaagattatcgccatgtcgatccgcaatttggcggcgatcgggcgctgctacgcctgcggcgtaaaacccaggtgcagggcatgaggctggtgctggatggcgtgtttaatcatagcggcgactcgcatgtgtggtttgacaggcataaccgcagcactggcggcgcgtgccatcacccggactcgccgtggcgcgactggtactccttttcaccacaaggcgtggcgctggactggctgggttatccgagcctgccgaaactcgattatcaatcagaaacgctggtcgatgagatctatcgcggtgaggacagtatcgttcgtcactggctaaaggctccgtggaatatggacggctggcggctggatgtcgtacatatgctgggcgaggcgggcggggcgcgtcataatttgcagcacgtcgccggtattacccgggcggcaaaagaggcgcagcccgaagcctatattgtgggggaacatttcggcgatgcgcggcagtggctacaggccgatgcggaagatgccgccatgaattatcgcggcttcaccttcccgctatggggatttctcgccaatactgatatcgcttacgaaccacagcatattgatgcccggacctgtatcgcgtggatggataactaccgcgccgggctgtcacatcagcaacaactgcgcatgtttaatcaactcgacagccatgatactgcgcgctttaaaactctgctgggtaaagacgcggcgcgcctgccgctggcggtggtctggctgtttacctggcccggcgtgccatgtatttattacggcgatgaagtcggcgtggacggcgcaaatgaccccatgtgccgcaaaccgttcccatgggatgaacgcaagcaggacggcaacttgctggcgctgtaccagcgtatggcgaaactgcgccagagcagtctggcgctgcgtcgtggcggatgccaggcgctgtatgccgaaggtgacgtagtggtattcgtgcgagtttatcagcagcagcgggcgctggtggcgattaaccggggcgaggcctgtgaagtggcgctggaagcgttgccgttgctgaacgtggccggatggcaatgtaaaacgggaagcggtgatatccgcgagggaagacttagtttacccgcgatttccgcgacggtatggatgaatcgttgaggcgaggtggttcgtaacaccttacgcataaaaaaggctcgcattcgcgagccttttatcaatgcactgacttacaggctggaaatgttctcagccaggtatttagccacgccgtccggagaggcgttcatgccttctttgcctttttcccactgcgccgggcagacatcaccgtgctcttcgtggaactgcagcgcgtcgaccatacgcagcatttcgtcgatattacgacccagcggcagatcgtttacgacctggtggcgaacaataccgttagcgtcaatcaggaaagagccgcgcagcgcaacgccttcgtccgggtgttcgataccgtaagctttctgaatttcacgcttcacgtcggcgaccattgcgtatttcaccgggccaatgccgcctttatcgacaggggtgttacgccatgcgttgtgaacgaactcagagtcgaaagaaacgccgaccacttcaacgccgcgcttctggaattcttcataacgtttatcaaaggcgatcagctcagacgggcaaacaaaagtgaagtccatcggccagaagaacagaacggtcgttttaccattggtgtgctgtttgaagttgaatttatcaacaatctcaccgctacccagtaccgccgcagcggtgaaatccggggcctgacgagtaaccagtaccataataattctcctgcaatattaagggttttagaacgcaacgcgggcagtatagggagggcgaagcgacaaaacaatgcggtcttgacaatcaatgagacagcttttgcctatcgatcgggtcattataaatcgtaatgatgacccttttatgacagcgaacgatctttctgccaacggcggatctgacgcacgccctcgctatcaggccgtcacagcgctttgcgggcggcctgtgccatcatacgcggataaaaatgccagaagcgctcttctaacgcgtcgtagtgcgcgtccagatcgtaccaggaatcacgcaaggcatccagccggggacggcgattcgccatgccattcagcacgttttgaatgaaatccatatcgcgataccgctctaaccatttttctgaccaaagataatcattcaggttgacaaagcgcggcggggagtcgggcagaatcgtcgcgacctgcgcatgggcgtagccgacaaacgcctgaagtggaaaatcgggagagatttgcgtccagtgacgcgataaaaaatgatcccacatgacgtccagcgtaatgggcgccacgcgccgcgtttcatggcggaaccactctcgcgcctcacgaacttccggcaggttgtcggtcatgacgtcaatacgccgatgcatataaataccctctaccacgtcaggaggataatgcgttgccgggttaccgcggacaaaatcggccagaagattaccggaaagcgagctgtcggcaaggtgcgccagatgcaggtgagcaagaaaattcattattgattctctgtccaaaaagcgggtaacggttgcagcgggaacgccccggcactagactacccgcctcttattttagtctgagtcagagtcatgcgcgttaccgatttttcctttgaactacctgaatccctgattgcccactacccacagccggaacgcagtcgctgccgtttgctgtcattagaggggccgacgggcgcgctgacgcacggtactttcaccgatctgctcgataagctcaaccctggcgatttgctggtcttcaataatacccgcgtgatcccggcgcggctctttggccgtaaagccagcggcggcaagatagaagtgctggtcgaacgtatgctcgatgataaacgcatcctggcgcatattcgcgcttctaaagcgccaaaaccgggtacggaactgctgctgggcgacgacgaaagtattcacgcgaccatgaccgcgcgtcacggcgctctgtttgaagttgagtttaatgacccgcgtccggtgctggatattcttaacgccatcggccatatgccgttgccgccgtatatcgaccgtccggacgaggacgccgaccgcgaactgtaccagacggtctacagtgaaaaaccgggcgccgtcgccgcgccgaccgcggggctgcactttgatgagccgctgctggcggcgcttcgtgagaaaggtgtcgaaatggcgtttgttacgctacacgtaggcgcgggcactttccagccggtgcgtgtcgataccattgaagatcacatcatgcactccgaatatgctgaggtgccgcaagaggtggtcgacgcggtgctggcggcgaaagcgcgcggcaaccgcgtgattgctgtcggcaccacctcggtacgctcgctggaaagcgcggcgcaggcggcaaaaagcgatttgatagagccgttcttcggcgatacgcaaatctttatttatccaggttatcaatacaaagtgattgatgcgctgatcaccaacttccatctgccggaatcgacgttgattatgctggtttccgcatttgccggttatcaacacaccatgaatgcctataagactgcggtagaacaaaaatatcgcttttttagctacggggacgcgatgtttatcacgtacaatccgcaggctatttctgagcgtccgtaagaaggctatctcacttgccattttgacgccgggcagtgctcgccatcctcacgtactgcgtgtacgctccggtggctgtgcgctggtcgaccccaaactggctgcgccgatgacgtcttcgggaatttattagctatggaatcattccgtagcgagtcgttaaacgtcggactgtttttctgacgcaggagtgataatgaaatttgagttagataccaccgatggtcgtgcgcgtcgcggtcgtctggtgtttgatcgtggcgtagtggaaacgccagcctttatgcctgtgggtacttacggtaccgtgaaaggcatgacgccggaagaagtggaagcgaccggcgcgcagattattctcggcaacactttccacctgtggctgcgcccgggtcaggaaatcatgaagctgcatggcgatctgcacgattttatgcagtggaaagggccgattctcaccgattccggcggcttccaggtcttcagcctcggcgatattcgtaagattaccgagcaaggcgtgcacttccgtaacccgatcaacggcgatccgattttcctcgatccggaaaagtcgatggagatccagtacgatctcggttccgatatcgtgatgatctttgatgaatgtacgccgtacccggcagactgggactatgctaaacgctcgatggagatgtcgttgcgttgggcgaagcgtagccgcgaccgttttgatagccttggcaataagaatgcgctttttggcatcattcagggcagcgtttacgaagatttacgcgatatctcggtgaaaggtctggtagagattggctttgatggctacgctgtcggcggtttggctgtcggtgagccgaaagcagatatgcaccgcattctggagcacgtttgcccgcagatcccggctgacaaaccgcgttacctgatgggcgtgggtaaaccggaagatctggtggaaggggtgcgtcgcggtattgatatgtttgactgtgtcatgccaacgcgaaatgcccgtaatggtcatctgtttgtgaccgacggcgtggtgaagattcgtaatgcaaagcataaaagcgacaccagcccgcttgacgccgagtgcgattgctacacctgtcgcaattattcacgcgcttacttgcatcatctcgaccgttgcaacgaaatattaggtgcgcgtctcaataccattcataacttgcgttactaccagcgtttgatggcgggtttacgcaaggctattgaagagggtaaattagagagcttcgtaaccgagttttaccaacgtcaggggcgacccgttccacctttgaacgttgattaattttaataatgagggaatttgaatgagcttttttatttctgatgcggtagcggcaacaggtgctccagcgcagggcagcccgatgtctctgattttaatgctggtggtgtttggtctgattttctatttcatgatcctgcgcccgcagcagaagcgcaccaaagagcacaaaaagctgatggactccattgcgaaaggtgatgaagttctgacgaatggcggtctggtcggtcgagtgaccaaagtagcggaagccggctacattgccatcgcgctgaatgacaccacggaagtggttatcaaacgtgacttcgtagctgccgttctgccgaaaggcaccatgaaggcgctgtaatatttcgttttcccaaagggaactgccgtgttaaaccgttatcctttgtggaagtacatcatgctggtcgtcgtgattatcgtcggcctgctttacgcacttcccaacctgtatggtgaggatccggctgttcaaatcactggcgtgcgcggcgtcgccgccagtgagcaaacgctgatccaggtccagaaaacgttacaagaagaaaaaattcccgctaagtctgtggcactggaagagggcgctattcttgcgcgcttcgacaccaccgatacccagctacgcgcccgtgaagcgctgatgagcgtgctgggggataaatatgtcgtggcgcttaaccttgcgccggctacgccgcgctggttggcggctattcacgccgatccgatgaagctcggtcttgatctgcgcggcggcgttcacttcctgatggaagtggatatggataccgcgttaggtaaactccaggaacaaaatatcgatagcctgcgcagcgatctgcgtgaaaaaggcattccttataccaccgttcgtaaagaaaataattatgggttgagcatcacgttccgtgacagcaaagcgcgtgatgaggcgatcgcctatctgacgccgcgtcatcgtgacctggtgatttccagccagagcggtaatcaacttcgcgcggtaatgaccgatgcgcgcctgagcgaagcgcgtgaatacgccgttcagcagaacattaatattctgcgtaaccgtgttaaccaactgggcgtcgcggagcctgtcgtacaacgccagggcgcagaccgtattgtggttgagctgccgggtatccaggataccgctcgcgcgaaagaaattctcggcgcgaccgcgacgctggaattccgtctggtgaataccaacgttgaccaggccgccgctgctgccgggcgcgtaccgggtgattccgaagtgaaacagacccgcgaaggtcagccggtggtattgtacaaacgcgtgatcctcaccggcgaccatatcaccgactcgacgtccagccaggatgaatataaccaaccgcaggttaacatctcgctggatagcgcaggcggcaatatcatgtctaacttcactaaggacaatatcggcaaaccgatggcgaccctgtttgtggagtataaagacagcggtaagaaagacgctaacggtcgcgccgtactggtgaaacaggaagaagtgattaacattgccaacatccagtcccggctgggtaacagcttccgtattaccggtatcagcaacccgaacgaagcgcgtcagctctcgttgttgctgcgtgcgggcgccctgattgcgccgattcagatcgttgaagagcgcaccattggcccgactctgggtatgcagaacatcaagcagggcctggaagcctgtctggccggtctggtggtctccatcctgttcatgatcttcttctataagaagtttggtctgattgcgaccagcgcgttagtggctaacctggtgttgattgtcggtatcatgtcgctgttgccgggggcaacgctcagtatgccggggattgcgggtatcgtgttaacccttgcggtggcggtcgacgccaacgttctgattaacgaacgtatcaaagaagagttgagtaatggccgcacggtacagcaggcgataaacgaaggctatgccggcgcgttcagttccatcttcgatgcgaacatcacgacgctgattaaagtcatcattctgtatgctgtcggtaccggggcaattaaagggttcgcgattacgaccggtatcggtgtggcgacgtcgatgtttaccgcgattatcggtacgcgtgctatcgtaaacctgctatatggcggcaagcgcgtcactaagctgtcaatctgaggagtgcgatgtggcacaggaatacactgttgaacaactaaaccacggccgtaaagtctatgactttatgcgctgggacttctgggcattcggcatctccgggctgttgctgatcgcggccattgtcattatgggcgtacgcgggtttaactgggggctggatttcaccggtggtacggtaattgaaatcacgctggaaaaaccggctgaaatggacgtgatgcgcgaagcgctgcaaaaagcgggctatgaagagccgcagttgcagaactttggcagcagtcacgacattatggtgcgtatgccgccaaccgaaggtgaaaccggcggtcaggtactgggtagcaaagtggtgacgatcattaatgaagccaccaaccagaatgcggccgtgaagcgtattgaattcgtggggccaagcgtgggcgccgatctggcgcaaaccggcgctatggcgctgctggtggcgttgatctctatcctcgtttatgtcggtttccgctttgagtggcgactggcggcaggggtggtcatcgcgctggcgcacgacgtgatcattacgctggggatactgtcgcttttccatatcgagattgacctgaccattgtggcatcgttgatgtcggtgatcggttactcgctgaatgacagtatcgtggtctctgaccgtattcgtgaaaacttccgcaaaatccgtcgcgggacgccttacgaaatctttaacgtgtcgctgacccagacgctacaccgtacgttgattacctccggtacgacgttagtggtaattctgatgctgtacctcttcggcggtccggtactggaaggcttctcgctgacgatgctgatcggtgtctctattggtacggcatcttctatctatgtcgcatcggcgctggcgctgaaactcggtatgaagcgcgagcatatgctgcagcagaaagtcgaaaaagaaggggcggatcagccgtccattctgccgtaaacacgtatttaagtgttatctgaatcccggtcatgcgatcgggatttttttatttatgtaccatgacgataaacattactgacagtatgctgtcaggagccctgtcatacactcctcatgaatttacccacactcgcaggaggatgtatgaaaaacttgattaactggtttgaaattccagttactgatatggcgcgtgcaatcgccttttatgagcaagtgatgcagatatcgttacgtcgggaaaccatggatggggcggacctggccgtattcccgtatgctgaacccggacccggcggagcgctgataaagcaggatgatgtcgctccagttgcgcagggagtcgttatttatctgcataccgccgatttgttagcctcgattgaacgtgtcgtccttgccggtggcaagtgtgttctggaacccatggttcccggagatgacattggaaccatcgcgttgtttattgacagcgaaggcaaccgaataggtttacatcaacctgcgtgatatttgctaaatgtagagagtcaatatgaccagacgcgctgaccgtttgtttcagatcgtgcaaattttgcggggtagacgactgacgacggcagcgctgttggcacagcggcttgcggtttctgaacggacgatttatcgcgatattcgcgatctgtcgttatccggtgtgcctgtcgaaggtgaagcggggagcggataccgtttaatggcaggttttgatctgccacccttgatgcttacccatcgtgaatcggaagcactgatggtggctatacggttattgaaaacctggggcggcgattcgctatcacgcgagcttgaatccgcccaggaaaaagtgttggccattttgccggaagagagccgccgtaaagcggagcagacacggatttacgctccggatttgggtacatctccacattcgcgcagcgcgtttgatcttatccatcaggccgtttcggcgcagcaggtgttggcgctacattatcgtgatgaagcggggcatctctcttcgcgggatatacaaccgctgggattgtttttctggggagagcactggctgctggttgcctggtgtgagagacgggaagactatcggtgttttcgcctcgatcgctgtttacaaattactccgcttaaccggcgatttcgtgaaacaatcgaccgttctttgcgtgattttttgcgaaaagtcgagcacgaaaaaatgccgtaagatgtgatagcgatacctctaacgcttgtaaaacgggttgattggtcatcagtttgcctgaaatagccttgcttacctggatatataagttgcacagaatcattgctaaaagcccggcttcgcgggaaactgggcataaccctttgtattattcaggtacctgttaattatggctatcatcccaaaaaactacgcgcgcctggaaagcggctatcgtgaaaaagcgctgaagctgtttccgtgggtgtgcggacgttgttcccgtgagtttgtgtattcaaatctgcgtgagctgacggtgcatcatatcgatcatgaccacaccaataacccggaagacggcagcaactgggagctattgtgcctctactgccacgatcatgagcattctaaatataccgaagccgatcagtacggttcgacggtcattgccggggaagatgcgcaaaaagatgtcggcgaggcgacttataacccgtttgccgatctgaaagcgatgatgaacaaaaagaaataagcagactgctgacaaagctgttggtgctgttgaatgttaggttacgcttcgctccacccaacggaatccgcaatataaatgaattattggttttcgtaggtcggatgcaatctggcattttttcagccccggagtttgtcgccagccccaaatgtcctgtaacgcatacattgtcactggaatcccgatcgcaaggttgggatttttttgtttttaagtcctgccgatactggcgagcagagtagaatcagcggtaagccggggcaacccggtgaggcgcaatgttgcgggggcttgatccccggtggccttgtcgctggaaagagaaaacccccgcacattgttcggtattcaccggcaacattacgggggctaacttgactccagacaagttgaggatagccgcgaaccgttgccattgcaacaaaggcggcaatatgacgctcacagagttgagcattactatctggcacgatctggcggcaccaacgctggtcgggattgcgacaggtctgtttttaggctggtggcatcgccggaagtaatgtgaagtgggcgcgactcgccgccgcatggcagcatgcgcccgaaacgggccagaggacgacctctggccttttttgcaggtttagaagttgtaacccacgaccaggtagccgccccagccggtagatttcgcgctgaaatcgccgtcgccccagttcagttttgcgccattctgccactgtccgccgttatggaagtaacgcgcaacgaccgagtagtgccagtgatcgtagttcagcgccaggatatggctggaagcgatggagttgctggtacggttcggatcgtcgcctaaatcagatccccagtcaaagttggtaaagccgatatagctcagtttaccgccccacagatcggtgatggggacgaagtatttcactttgaaacggtagccgtcccattcgttttcattggacgcgccgtagttttgccactgatatttcgcatacacgttcagcgacagacccatcggcaggccggtgtcgatatcggtccccagacccatataccacgtgctctggcggctggctttgttatcgcccatatcgtagatgtagttgttggcgaaataccactctttaaacgggccgaagctcaggtctgcgccggtcagcttatcaattgagaaacgcggttcgatttccatgaacagcggagaaccgtcggaccagatacctttatcgttgccgttaccccaatcaaaggttttgggaatatcgatatagccgtagaaatcaaaccagtcttttttggcaaatgcttcatattccagatagacgtcgttgttcaatttcggcgagaaacgggtatggtagctgcctaccacgtttacgctctggtgccaccagtcggacaaatactgcggctgatcattttctgctgcgttagcagtaaaagatgaggtgagcgccagcgctgcgctgactgcgagtaaagtttttttcatatgtatgccactgtttgaaatcccttgcgggagtgaaaagaacgcaatttgcgtttctaaatatttcgtgtttctgcggagcctattataaaaatcattgctcacaaaaatatgtcttgtttcacatatctatcatttacgtaatcgattgcgttcacgtttgcgcattttagacgcggcgacagtactatctttcatgaatattaccaatccatgtcataaatgacggaaatgtcagtagggcaacaaaagtcgcgcgggggatgttgcggaacgcacaaaacgctccgccagaacgtttattgattaacaggctgaatatcatggatgcgaatgaagcctaactgcgccggtgtgatccccttcaacggtaacgaaatattgacatcactgggcgccagcaagctggctggggcatttaccagaaggctctgtgcattcacctcctgatagttctccgtagtgccctgaagttgcccgtactctacggtagcgctgaatgccggcagtggatcgcgggactcgccctgaatgtgtaacgttgcgtgagcgccgtctgcgacaggcgtaatttccagcaatgtcatacgtagcgtaccgatctggctctccagccgggcaggcgtattggcgccaggcaacaaatagacgccgcgggttgactccgcattcagcttattttgttgggtaatttttaccgtttcctgattcagttgggtcatctctttattcagggtgctaatgctttgatgcatctggcgaacttcgctctgcggcgcgcaggcggtcaggctcaagagacttcccaccaggagaattcttaggtaacgtcttgtcatgtcgatcatttccttcatggttcgatagcgtaatggtagtgcgctatacgcacaaaggcaccgatcctttatctcaaaagcgctccgcctttgttgtcgcgccagttcagggtaaaataacatttcctaaatcatctggtcaggacgccgtatgcattgcccattttgtttcgccgtagataccaaagtcattgactctcgtcttgtaggcgagggctcgtccgtgcgccgccgtcggcagtgcctggtgtgtaatgaacgctttacgaccttcgaagtggctgaactggtcatgccgcgcgtgataaaaagcaacgatgtgcgcgaaccctttaatgaggataagctgcgtagcggcatgttgagagcgctggaaaaaagacccgtcagcgcagatgatgttgaaatggcattgaaccatattaagtcacaattacgtgccactggggagcgtgaagttcccagcaagatgattggcaacctggtcatggagcagctgaaaaaactcgataaagtcgcgtatattcgctttgcctccgtctatcgcagtttcgaagatatcaaagactttggcgaagaaatcgctcgcctacaggactaagccatgcaggatgagttttacatggcgcgagcgctcaaactggcgcagcgtggacgtttcaccactcaccctaaccctaatgtcggctgtgtcattgttaacaatggcgacatcgtcggcgaaggttatcaccatcgcgccggagagccgcacgccgaggttcatgcgctgcggatggcgggcgcaaaagccaaaggcgcaaccgcctatgtcacgcttgaaccctgtagccatcatgggcgaacgccgccatgttgcgatgcgctgattgcggccggcgtcgcgcgcgtggtcgccgcgatgcaggacccgaacccacaggtcgccgggcgtgggctgtatcgcctgcaacaggcgggtattgcggtcagccacgggttaatgatgagtgaagcggaggcgctcaataaaggcttcctcaagcggatgcgtaccggattcccttatcttcagcttaaactgggcgcctccgtcgacggacggacggcgatggccagcggcgaaagccagtggatcacctcgccgcaggcccggcgtgacgttcagcgcttgcgtgcgcaaagccacgctatcttaaccagtagcgcgacggtattggctgacgatccggccttgacggtgcgttgggcggagttagacgcctctacgcaggcgtcttacccgcaggaaaatctgcgccagccggtgcgaattgttatcgacagccaaaaccgggtaacgcctgcgcatcgtattgtgcagcagcctggcgaaacgtggatcgcgcgtacccaggaagatagccgcgcgtggcccgatgcggttcgtactatcagcgtgccggcgcacaacggacatttggatctggttgtgctgatgatgcagttaggcaggcagcagattaatagcatatgggttgaagccggaccgggactggcgggcgcgttgctgcaagccgggctggtggatgaactgattgtctatgtcgcgcctaaattgttgggaacccaggcgcggggattatgcgaattgccggggcttgagaagctcgccgacgcgccgcaatttaccttcagcgaaatacgtcatgtcggcccggatgtttgcctgcatatggtgagcgcatgagttctcccgtcgaaaggggagcagcgctcaaattattatgataaaatccgcccccctgcggggccaaatgaaccctggaagagagaatatgaacattattaaagctaacgttgcagcccctgacgctcgtgtcgccatcactattgcgcgtttcaatcagtttatcaacgacagcctgctggatggcgcggttgatgccctgacgcgtattggtcaggtaaaagatgataatattaccgtagtgtgggtgcctggcgcctatgaactgccgctggcgaccgaagcgctggcgaaaagcggtaaatacgacgccgtggttgcgctgggaaccgtgattcgcggggggactgcgcactttgaatatgtggcaggcggcgccagcaatggcctggcaagcgttgcccaggacagcggcgtgccggtagcctttggtgttctgaccaccgagagtattgaacaagccatcgaacgtgctggtacaaaagccggtaataaaggcgcagaagctgcgctgaccgcgcttgaaatgattaatgtattgaaagccattaaggcctgattttttgtaaggggaattccgtgaaacctgctgctcgtcgccgcgcccgtgagtgtgccgtccaggcgctttactcctggcagttgtcccagaacgacatcgctgatgttgaataccagttcctggcggaacaggacgtaaaagacgtcgacgttctctatttccgtgaactgctatccggggtggcgactaacagcgcgtacctggatggtttaatgaaaccgtatctgtcccgcctgcttgaagagctgggacaggttgaaaaagccgtgctgcgtattgcgttgtttgagctgtcaaaacgcagcgatgtgccttataaagtggccatcaacgaagcgattgaactggcgaaaacctttggcgctgaagacagccacaaattcgtcaacggcgtactggataaagcagctccggtgattcgtcccaacaaaaagtgattcacaggccggaaagatagcgggcgctcgatacccgccgtctccggccttttctttttttctgctgaggcataacgtatggcatgtggcgagttttccctgattgcccgttattttgaccgtgtaagaagctctcgtcttgatgttgaaaccggtattggcgacgattgcgcgctcctgaatattcctgaaaagcagaccctggcgatcagtaccgatacgctggtggcgggcaaccacttcctccctgatatcgatcctgccgatctggcttataaagcgttggcggtgaatttaagcgatctggccgcgatgggggccgacccggcctggttaacgctggcgttaacgctaccggaagtggatgagccgtggctggaggcttttagcgacagcctgtttgcgctattgaattactacgatatgcagctcattggcggcgacaccacgcgtggaccgctgtcgatgacgctgggtatccacggttatatcccggcagggcgcgcgctcaagcgatctggcgcgaagccgggcgactggatttatgtcaccggtacgccgggcgacagcgctgccgggctggcggttttgcaaaaccggctacaggtgtcggaggagaccgatgctcactatttaattcaacggcatttacgtccgacgccgcgtattttacacggccaggcgctgcgtgacatcgccagcgcggctatcgatctttccgatggtctgatttccgatctggggcatatcgtcaaggccagcggctgtggggctagagtggatgttgatgcgttgccaaaatccgatgcgatgatgcgccatgttgatgacgggcaggcgctgcgttgggcgctttccggcggcgaagactatgagctgtgctttacggtgccggaactgaaccgtggcgcgctggatgtcgccattggtcaactgggtgttccctttacctgcataggccaaatgagcgcagatattgaagggctgaattttgtacgtgacggaatgcctgtcaccttcgactggaaaggatatgaccattttgccacgccataaagatgttgcgaaaagtcgcctgaatttgcgcaatccgtggcacctgctcgctaccggctttggcagcgggctgagccccgtggtgccgggcacgatgggctcgctggcggcgatccccttctggtatttgatgacgtttctgccgtggcagctttattcgctggtcgtgatgtttgggatctgcattggcgtttatctttgccatcagacggcgaaagatatgggcgtacacgaccacggcagtattgtctgggatgaatttatcggtatgtggataacgctaatggcgttgccgacgacggactggcagtgggtggctgccgggttcgttattttccgcattctggatatgtggaaaccctggccgatccgttggtttgatcgcaacgtgcacggcggcatggggattatgatcgatgatatcgtcgccggggtgatatccgctggcatactgtattttatcggtcatcactggccgctcggtattatttaaagggtttgccggatggcggcataaacgccttatccggcctgcccctgaacaatatgtcgatttcgcaggcccgataagcgccgcgccatcgggcaatggcagattatttaaatcccactaccggatgctgtttgtacggcgtttcgagttcggcaatctgctccggtttgagcgttaaatcaacggcattcagcaactcatctaactgttcttcacgcgaagcgccgataatcggcgcggcgacgcctcgtttgctgagcagccagcccagcgcaacctgcgcccgcgttgcgccaagcgcctcgctgacgccagccagccgttccgctatttgcgcatcatttttatcgctttcatcgtataaatttttacccacgtcatccgagaccaggcgggccgtggtttctccccaggggcgagttaagcgcccgcgcgccagcggactccacggaatcacggcaacgccttcctgccagcacagcggtagcatctcacgctcttcctcgcggtagatcaggttatagtgatcctgcatggtgacaaacggcgcccagccgtgttgtttttgtagcgccagcgcctgggcaaattgtgaggcgtgcattgaggaagcgccgatatagcgggctttacccgcctttaccacgtcgtttagcgcttccagagtttcttctatcggcgtggtgtaatcccagcggtggatttgcaggatatcgacatactccattcccagacgggcgaggctatcgtcaatagagcgcaggatttgtgcgcgggacaatccttccggcagatcgccgacgcgatggaagactttcgtcgctaccaccacctcgtcgcgccgggcaaaatcacgcagcgcgcgaccgacaatctcttcgctgctgccgtcggagtagctgttggcggtatcaaaaaagttaatgccgccctcaagagcgcgcttgatgatgggacggctgctctcttcgggaagcgtccaggcgtgattgccgcgacttggctcgccgaatgtcatacagcccagacaaaggcgggatacccgaagatctgtatttcctaacgtgttgtattgcatgactccgctcctgttatacccgtcactcttcaagcatagcaggagcaaagaggggattatgccagccaggccttgattttggcttcaatgcctgcggcgtcaagccccagttccgcgcgggcttcttcctgcgttccttgcgggataaagaaatccggaagaccgatattcagcacaggtacaggtttacgatgggccattagcacttcgtttacgccgctgccagcgccgcccataatggcgttttcttccagcgtcaccagcgcgtcatgctgcgcggccatctccagaattaacgtgtcgtccagcggcttaacaaagcgcatgtcgaccagcgtggcgttcagcgcttcggcgactttcgccgcctcaggcattaaggtgccaaagttcagaatcgccagtttttcgccatgacgcttcacaaggcctttaccaataggcagtttttccagcggggttagcgccacgccctgcgcattaccgcgtggataacgtactgccgtcgggccgtcgttatagtgatacccggtaaataacatctggcgacattcgttttcgtcgcttggcgtcatgatcaccatatccgggatgcagcgcagataggagagatcgaacgcgccctggtgtgtttgtccatccgcgccaacgataccggcgcgatcgatggcgaacatgaccggcagtttctggatagcgacgtcatggatgacctgatcgtaggcgcgttgcaggaaagtagagtagatcgccacgacgggcttatagccgccaatcgccagacctgcggcgaaggtgacggcatgctgctcggcgatggcgacgtcaaaatagcgatccgggaatttacgtgaaaattccaccatgccggaaccttcgcgcattgccggggtgatcgccatcagcttgctgtctttggcggcggtttcacacagccagtcaccgaagatttttgaataaccgggcagaccgccgctgcttttcggcaaacatccgctggagggatcaaatttaggcaccgcatggaaagtgatcggatctttttccgcgggctcatagccgcggcctttcttggtcatgatatgcaggaactgcggccctttcaggtcgcgcatgttcttcaatgtgctgataagccccatgacatcgtgaccatcgaccggcccgatgtagttaaagcccagctcttcgaacagtgtgcccggcacaaccatgcctttaatatgttcttcggtacgcttgagcagttctttaattggcggtacgccggagaagaccttttttccgccttcgcgcagagaagagtaaagcttaccggaaagtagctgcgccagatggttgttgagcgcgccgacgttttccgaaatcgacatttcattgtcgttcagaatgaccagcatgtcgggccggatatcgcctgcgtgattcattgcttcaaacgccataccggcggtgatggcgccgtcgccaatcacacagacggtgcggcgatctttgccttctttctccgccgccacggcaataccgataccggcgctgatggaggtggaggaatgcccaacgctcagcacatcgtattcgctttctccgcgccacgggaacgggtgcagaccgcctttctggcgaatggtgccgattttgtcgcgacgaccggtaaggattttatgtggataagcctggtgtccaacatcccagattagctggtcaaacggggtgttgtagacataatgcagcgccacggtaagttctaccgtgcccagcccggaagcgaaatgcccgctggaacggcttacgctgtcgagtaagtagcggcgtagctcgtcgcagagtttcggcagactctctttcggtaacagtcgtaactcctgggtggagtcgaccaatgccagggtagggtatttggctatatcaaaactcatcgcaagctcattggatatggggtttatttatcacgctggattatgtagttcgctagcgcttccagtgccgaggtgtccagtgattgcgcggccagctgatgtaacgactgacgggcgtcctctatcaggtcccgggctttattccgggcttgctcaagacccagaagtgcagggtaggtacttttgccaagctgctggtctgcgccctgacgtttacctaacgttgcagtatcgcccaccacatccagaatgtcatcctgaacctggaaggcaaggccgatactctctgcatagcggtcaagtatcggcagagtattccgtcctttatcgcccgcgctcaatgcgccaagtctaacggcggcgcgaatgagcgcgccggtcttatggcgatgaatgcgttccagcgcgtccagagtgatccgctggccttctgccgccagatccaatgcctgaccgccgcacataccggcgataccgctggcgtttgccagttcggcgatcatcgcgatacgatcgcgatcggcgacttccggcatcggcgcgtcgctgataatggcaaacgccagcgtctgcaacgcgtctcccgccaggattgcgttggcttcgccaaatttaatatggcaagtcggcaggccgcgacgcaaatcgtcatcgtccattgctggcaggtcgtcatggatcagcgaataggcatgaatgcattcgaccgccgcagctggcgcatccagcgttgccgtactgacgccaaacatttgaccggtggcgtaaaccagaaatggccgcaggcgtttaccgcctaataatgcgccatactgcatggcttcgaccacgggagtgttctgaaagggcagtggcgcgataaaacggctcagcgcctgattcgcttgcgttacgcaagcctgtagctgctgcgtaaagtccatttactcattatccgcgataaaaggctcaggtgaagcctcttcattatcagacagcaaaatttgcacgcgctgttccgcctgctgcagttttgcctgcccctgacgcgccagttgtacgccgcgctcgaattcattcagcgcgtcttccagcggcaaatcgccgctttccaggcgggtaacaatatgttccagctcgctcagcgcagtttcaaagctggcgggcgcctcatttttcttcggcatgatgactgtttgactctctgtaatggcagtacaagtctatggtaacggactcacactgataagcaaataacgcgcaatggtaaggggaaatgcgcaagatgtccgtgatagtgatatacttccgcgcctggatgcagccgtaggtatgggctgctgtactatttctccacgacaagccttagatagcttgctaaagaaccattgccgccatgaagtttatcattaaattgttcccggaaatcactatcaaaagccaatctgtgcgtttgcgctttataaaaattttaaccgggaacatccgtaacgttttaaagcactacgatgagaccctcgcggttgtccgtcactgggataacattgaagttcgcgccaaagatgaaaaccagcgtctggtgattcgcgacgcgctgacccgcatcccggggattcaccatattcttgaagtcgaagatgtgccgttcaccgatatgcacgacattttcgagaaagcgttggcgcagtatcgcgaacagcttgaaggcaaaaccttctgcgtgcgggtaaaacgtcgcggtaagcatgagtttagctccattgaagtggagcgctatgttggcggcggattaaatcagcatattgaatcggcgcgcgtgaagctcactaacccggatgtgacggtgcatctggaagtggaagatgatcgcctgctgctgatcaaagggcgttatgaaggtattggcggtttcccgattggcacccaggaagatgtgctgtcgctgatctccggcggttttgactccggcgtctccagctatatgctgatgcgtcgcggctgtcgcgtacactactgcttctttaaccttggcggcgcggcgcatgaaatcggcgttcgccaggtggcgcattacctgtggaaccgctttggcagctcccatcgcgtgcgttttgtggcgattaacttcgaaccggtggtcggcgagattctggagaaagttgacgacggccagatgggcgtggtgctcaaacgtatgatggtacgcgcggcgtcgaaagtggcggaacgttacggcgtacaggcgctggtgaccggcgaagcgctgggccaggtatccagccagacgctaaccaatttgcgcttgatcgataacgtgtctgacacgctgatcttgcgcccgctgatctcttacgataaagagcacattatcaacctggcgcgccagattggtacggaagattttgcccgtacgatgcctgaatactgtggcgtgatttcaaaaagtccgacggtgaaagccattaaagcgaaaattgaagccgaagaagaaaacttcgacttcagtattctcgataaggtggtagaagaagcgaacaacgtcgatattcgtgaaatcgcccagcagacccagcaggaggtggtggaagtagaaaccgtgagcggtttcggcccgaacgacgtgattctggatatccgttctgtggatgaacaggatgacaagccgctgaaagtggaaggtgtggacgtcgtttcgctgcctttctacaagctgagcactaaatttggcgatctcgatcagagtaaaacctggctgctatggtgcgaacgtggcgtaatgagtcgcctgcaggcgctctatctgcgcgagcaggggtttgccaatgtgaaggtgtatcgtccgtaattcctttgccgggtggcggctatgtcctacccggcctatcgttttatttctgccccaaccgttttgcaatgcgctccagcttcatcatcagcagcagcgtaatggccaccagcacaatggtcagcgccgcgccgtcggcgatatttccacggtcggtcaagctaaagatagccaccggcagcgtcgtccagcccggcggataaatcatcatcgtcgcgcccaactcccccatggagagcgataaactcagcgccagcgctgacatcatccacggcatcaataacggcaacgtcacgtgacgcagacgataccagggcgatgcccccagactcgacgcgacgttttcaatatcggcggaaattcgcgccagtccggtcgacacgttactgaaggtaaaggcggaaatcagcacaaagtgcgctgtcagcacaatccatagggtgccgttcatttgcaatggcccctggctgaaagcaaccagaatgcccaggcccacggacactgacggaatcgcactcggcagatagaacaccatacttaaccatttctgcgttttcaccccatattgacgcagcgccagcgccgcccaaacgccgcaaagcagcgcaaacaggctggcgcaaaagccaatcgtgaggctggcaagtagggcatcccatgccgcaccgtgcagagcgttaacaaagtggttcagcgtgaagccactcggcagaataccgttccactgctggctaaggctggacatcagaatcaccgccagcggcaggaaaaagaacacgataaacagtacgctagccacaacgcccgccgctgcgcgtcctttaggtgaccaaattagcatggctagctccttacgccggtacgcgatgccgccaggcgatagagggagaacagccccagcgacaagacaatgttaatcaacgcaatcatgcaggcgaccgtatagtcggactccagaatcgctttgctgtaaaccatcatcggcagggtgttaacccctttcgcgccaataaacagtacgatgccgaactcgttagtggtcaacagcaggcacaggctgccaccagccatcagcgccggtagcgcagccgggaaaatcacctgcccaatcacccgtaacgggtgcgcccccagaatactggctgcctctagctggcttttatcaatttgccgcagcgcggccatcagtggccgcatcaccagcggagtgaacaccgtgatctccgccagaatgacgccctgcatcgagtagagaaaatccaccggcggtagctcaaaggcaaacaggctcatcagcgtaccgttgagcagacccgctgacccataaataaaggtgaacgccagcgtaatcaggaaggtcggcagcgcaataaaagtatcgacgacccgaccaatcaactcgctgccggggaaaggaataaacaccagaatcagcgacatcacgctgcccagcagcaggcaaccggcggtggcgaaaaaggcgatttgcaacgtgttcagcaacgcgccgacaaagcgtttcgagtcgaccacctggcggaaggtctcgagcccgatctcgccattggcaccgcgtagcgcctgttcaacgatgagcgacagaggccagaaaaacagcgtcgccagcaccagcaacgggagcagcagccacagcagcgggcgtaggttaagcgccggtttttccagaggtaaaatgagtgacatggttatacctcaatcaggaccgcatcatccggttcgaaccacagcgccagcttgtcgcccacgcgcggcagcggattgacatgcgtcaacaccatccgcaccgtttcgccagcaacgtcacacagcagatgggttaaatcgccctgccagtgcaccgattgcagtgtggcgttgaagcggttgctgtaggccgaacgcggcgtcaggctgaggtgctgaggacgaatgcacagcagtttgttgtaaccgtggtggctgccccggctgaacgcgcgaatcaccgcaccgccgcagctgacgtccaccagccccggagcctccgttatccccagcgcgatggcggagagaatattggcgcgacctaagaattcggcggcaaaacgattgggcggatgctgatatagcgcgcgggtttcgccgtgagcaatcagcgagccatccttcataatgccgattttatcggccagagtgagcgcttccgtttgatcgtgggtgacgtagagaatagtgagttccggcagctcacggtgaagacgggcgatttcttccaccatattatgacgaatctgtgcgtccagcgctgacagtggttcatccagcaacagcacgcgcgggcgcacggcaatcgcgcgggcgatggccacgcgttgctgctggccgccggaaagttgatgcggataacgggcggcgtaatcactcatgccaaccgttttcagcgcctgcgttacacgctcattaattagcgcctttggctgcttctgcgcacgcaggccaaaagcgacgttgtcttccactttcagatgcgggaacaaggcgtagttctgcaccaccatcgccaacccgcgtttatagggtggcagatgggtgacgtccgtatcgccaatcagaatacgaccgcctgcaggttgcacaaagcccgcaaccgcacgcagcaccgtcgtttttccagatcctgatgggccaatcagcgccagcacttcgccaggttcaatcgtcaaagagagcggtttaagcaccacgttgccgtgatacgcaacgcgcagcgagtcgaggactatccccgatgtcccctgcgatgcaggggcgtgaacggtggtcgttttcatcagcatcaggcttactcgctttcggtcactttgtgccaacggctaatatctgccgacagcgaaacggctacgtcatcccaatttggctgccagctctgcacgccttctaacgcggcagtggcggccttataatgttcgtcgctcggcgtcacgtcgctgcgtaccggcattccccaggagagttcgctgacgcgagtctgcgcttctttactcagcaggaagttaatcagctttttaccattttcactctgcggcgccccctggaccaggccaatgacataagggatggccagcgcgctgcgctcgcctttgtcgttggccggccagaagattttcacgttcgggttacgttccatctgcgcgaggttcatttgcaggtcgccgttagcgacgtagatttcacctttattaaccagcgcggttagcttgccggtagaggcagatggcccgacgttattggcctgcagcttgccgagatacgcaaaaccggcatctttactgccgaagctgtggaaagcctgcagcatcaccgccgtgccgtcagcggcctgacctggcgtggaatactggagtttatttttgaatttaccgtcaagcagatcctgccagctcgccggggcagttttcagcagcttgctgttgtagataaagctcagatagttctttaccagcggcgaataaaggttgttggcatcggggatagccgatgcggtgtcggtgttaaagttcgccagcagcttttcggcggcggcgcgctgaatgaatggcggcgcggttaccagcacgtcggcctgtggattcgtgcgctcttttgccagacgttccactaccacgccaccaccgccttcaacatagcgtacggtaatgccggtcgctttggtgaatgcgtcaaactgtacctggtaccagctgttatcgccatcatgcagcccgtcgatggagtacaccgtgaccaccgattccgcccatgacggggcgctggcgagagcgaagacagacagcagagcaagtcgggaaagtttcatcgtaatagcctcatagcgtacgttgcattttctggcctataccaggtttgctttttacgctaaacggcttatatgacaaaacgatgaaagagaaataaatcagtccacgccggatgatgctgcgcttatccggatagccgtgagacgatacgattggtaggccggataagtcccgcagccaacatccggcgcatccgctagtgggtatctacctcaatacgcaggctgtcgtgacgccagtattcgatatccagatccagcactcgcccgtgttgatcgtagttcagacggcgcagcaacagcgccgggcgcccttccataacgcccagcgcctgtgcggcctgcgcaggcatggcggtggggtagaacgacagatgcatgctggtatagacgaggttgtagtgcgactcgtatacctcggtcaggctgccgttgagatcgtactgcagcagctcaggcacgcgggcgggcaaacaatggttttcgcagtagcacacggcgcggccatcggcgtaacgcagacgggtcagcagatagatttgatcaaacggctggagctggaggggctccatgacctcgacaggcacggtggttaacacgccgctcagtagcgcggtttttggctcccgcccctgctcgcggcaaagcttatggaagttggtgttctgggtcggatccagccacaggcgttccggcgtaacgaaccaaccgcgacgatcggcgcgccagataagcccactggactccagctgtgccagactttcgcgaatagtaatgcgcgtggtgttgaagatcgcgcacagttcgcgttcagacggcagtttatcaccgcttttcaacgcaccgctctgaatacgcgcctgaagctgcgccttgatcaacaggtactgcgggatatcgcccgggatagatttcatgcttactcgcttccgttttgcctgccgccattatacaagcagagatgaattttttgttgcagcgcgattttctctttgacccgtcgcggcaaagatcgtcatgataaatgcaatctggtatagaccaaaggtaaataacatgacttcgcgtaactatctgttgctgactcctggcccgctcaccacctctcgcaccgtgaaagaagcgatgttgttcgatagctgtacctgggatgatgattacaatatcggcgtggtagaacagatccgccagcagctgaccgcactggcaacggcctccgaaggctacacctccgtactgctgcaaggcagcggcagctatgctgtggaagccgtactgggcagcgcattggggccgcaggataaggtgctgatcgtcagcaacggtgcatacggcgcacgaatggtcgagatggccggccttatgggaatcgcccatcacgcttacgactgcggcgaagttgcgcgcccggatgtgcaggcgatcgacgcgatcctcaacgccgacccgacgatcagccatatcgccatggtgcatagcgaaacgaccaccgggatgctcaaccccattgatgaggtgggcgctctggcgcatcgctatggcaaaacctacatcgttgacgccatgagcagcttcggcggcatccccatggatattgcagcattacacatcgactatctgatcagctccgccaataaatgcattcagggcgtgccgggttttgcctttgtgattgcccgcgagcaaaaactggccgcgtgcaaagggcattcccgctcgctgtcgttagatctctacgcccagtggcgctgcatggaggataaccacggcaaatggcgttttacttcgcccacacataccgtcctggcgtttgcacaggcgctgaaagagctggcgaaagaaggtggcgtagcggcacgtcatcaacgctatcagcaaaatcagcgcagcctggtggccggaatgcgggcgctgggctttaacacgctgctggatgacgaacttcattcgcccattatcaccgccttttattcaccggaagacccgcagtatcgctttagcgaattttatcgccgcctcaaagagcagggctttgttatctatcctggcaaagtgtcgcaaagcgactgcttccgcatcggcaatattggcgaagtatatgccgccgatatcacggccctgctgaccgccattcgtaccgccatgtactggacgaaataaggaaccatgatgaaccgtattcacgctgttattctcgactgggcgggcaccaccgtcgattttggctccttcgcgccgacgcaaattttcgttgaggcgttccgtcaggcatttgatgtggagatcaccctcgctgaagcacgcgtgccaatggggctgggtaaatggcaacacattgaagcgctgggaaaattacctgctgttgacgcgcgctggcaggcaaagtttggccgctccatgagcgcagcagatattgatgccatctacgccgctttcatgccgttacagattgctaaagttgtcgatttttcttctcctattgccggagttatcgacacgatcgcggcgctacgagccgagggtatcaagataggctcctgctccggttacccacgagcggtgatggagcgcctggtccccgccgccgccgggcatggctatcgtccggatcattgggtggcaacggacgacctggccgcgggtggtcgcccggggccgtggatggcgctgcaaaacgtgattgcgctgggcattgatgcggtcgcgcactgtgtgaaggtagatgatgccgcgccgggcattagcgaggggcttaacgcggggatgtggacggtggggctggcggtatcgggtaacgaattcggcgcaacatgggacgcctatcagacaatgtcgaaagaggacgttgcggtccgccgcgagcacgcggccagcaagctgtacgccgccggggcgcattacgtggtggattcactggcggatttacctggggtgattgcgcatattaatgcgcgtctggcgcagggcgaacgcccgtaaaataactgccggatggcgctgtcgcttattcggcctacagactgtaccgttttgtaggccggataaggtgtttacgccgccatccggcaatcattcttattcgtagtagttataaatccccgccgccatcaccagttgcgaagccacttcatgcgctttttcacgaccagccaacaggtcgatgattttcaaaccaaaatcgatagcggtacccggtccctggctggttaataattttacccgcgcatcccacaccacacgcttatccagccactgttcggcggggatcttatctttcagcgccggaaaaccggtcatattgccgatagggaagatatcgtgcggcacgagcactgtggcggctgcggcgcaaatggctgcgacaatgcgcccggagcggtgaaactgttttacggtttcgaccagcagcgggctgtcgcgaaagcactcggcgcctttaattccgccgggcaacacgatgatgtcataatcgccgtcggcaacttcaaccagcggcgcatccgccagtagctttacaccgcgcgagcagacaatcgtcaggttgccatcgctggcgacgctggcggtagtgacgtggattccgccgcgaaccagcagatcgatagtggtgaccgcttcggtctcttcactaccaggggcgaggcataccagtgcctgagcgctcatactcactctcctttcgctttaccatttcaaacaggcggctattttccggaacggcgagaccgtgcacgcgggcgcgcttgagtaaataaccggtgatgtagtcaatttcggtatggcgcatggcacgcacgtcctgcaacatggatgagatgttttctgccgtactgtcaatcacttgctcaacataatagcgtaaatcgtctgccgatgtgtggtagccttcacgttcaatcacggcggcgacctcttcgcaaatcgcgttgatttcatcagtatgatggcgcagctcgccgttcgggcagttccaaagcgcggtgagcgggttgataacacagttgaccgccagtttgcgccacatctctgcgcggatattgttatgccaggcgacatcgggcagtaccccctgcaggatatcggcgagataactgtaatcgccgtcttgctcgcgcgccgggccaatatgcgtagtaccgttagcgacatgaataatgatattaccgtcgcggcgcgcagcatgggtgatagtccccatcaacatcggctgttggatattttgcagttcttctatggttcccattccattatgaatgagcaggataggcgacgtcaccggtagggttgacgccagggttcgtactgcgtcggaaacctgccacgctttcagcgtgactaataacagttcgctcttcgccaaaaaatccggatcgtttgccgtcagtgattcgttgaaaaaggaaccatcggtatcgatcagatttacgctgcaataaggttgtggcacccgtagccagccctgtacgtcatgtccgtgtttgcacagtgccgaaagccaaagttgtcctaaggctccgcatcccagtacagtaattttcattgttcctcctcacctgcaacagcgccaggtgttatggcgctaattatagcgtcatcagctaagcttctcgttaagcctcgttgcaggtattatgcaacgcaacgaaaatgaagggagaagaaaagatgccatctttcgatattgtttctgaagttgatctgcaggaagcgcgtaacggtgtggataacgcggttcgcgaggttgagtctcgttttgacttccgtggcgtagaggcgactattgaactgaacgatgccaataaaaccatcaaggtgctgagcgagtccgatttccaggtcaatcagttgctcgatattctgcgcgccaagctgcttaaacgcggtattgaaggcgcttcgctggatgtaccggacgagttcgtgcatagcggtaaaacctggtatgtggaagcgaagctgaagcagggcattgaaagcgccgtgcagaagaaaatcgtcaagctgattaaagacagcaaactgaaggtgcaggcgcaaattcagggggaagagattcgcgtgacgggcaaatcacgtgacgatctgcaatcggtaatggcgctggttcgcggcggcgatttgggccagccgttccagttcaaaaacttccgcgattaagttgttatgccggatagagcctcgccgccatccggcaatgcagtattcatcctttgctgataagctgttcaacttcaaagcgattggtcactttgctgtcgattttgacgtaagcggaatgctcttccgccacgatcagcgcttcgcttacgcctttcattgccaacagtcgctgttttagcctgtcgtcagcaacgatatccgctggaatttccacacgcaggctgctgacatagggcggctctttcatggtacttgccactgccagccataccatcgccagtacggccccggcaaggaaaacggtttgcccatcaaacgtgccgtctatccagccgcccagcgagccgccaagcgccacgccaagaaactgactggtagaatagacgcccatcgccgttcctttataccccgcgggcgactctttgctaataagcgaaggcagcagcgcctccatcagattaaaggcgaggaaaaagagttgtacgccaatcaccagctcccagaaatgctggcccgctccccacaacacgatttctgcgacgacaatgagccccacgcagaacaggaatacctgcttcatccgccgtttgacttcagcatagataataaaaggcacgacggcggcaaaggcgatcaccatggttgccagatacaccttccagtgttcggcggcagggaaaccggcatcggcaagctggccgggcagggcgacaaaggtggacatcaataaaatatgcagacacataatgccgaaattgagtttgagcagcctcggctccgccagcactttactgaagctgcctttgaccatcccggattcgcgattcagcacatggttggtactgttgggaaccacccagatcgtcagaagaatgcccagagtggcgagggcggcgatcatccagaacaacgcgttcaatcccagactatgggtaacgatcggccctaataccatcgcaatcgcgaaggtgataccaaagctgacgccgataaacgccatcgctttggtacggttttgctcgcgggtgaggtcagacaggagcgccatgacggcggcggcaatagcgccggacccctgtagcgctcgccccagaataatgccccagattgagtgggagagcgcggcaatgacgctgcccgcgacaaataccgccagtccgccgacaatcagcggtttgcggccaatgcggtcggacagcagcccaaagggaatttgaaagatagcctgcgccagcccgtaaatgccgatcgcaatgccgattaatgcttcgctggcgccctgtagcgccataccgtatgtggtcagtactggtagaaccataaacatgcccagcatacgcaacgaaaagacggtccctaaaccccatgtggcgcgcagctcccctggcgtcattttataatcgttcattgccacctctgtataaaagctgggagtagtgtagtgcggggagtgtgccgggtaaatagagggttaattagcaaatattatgtttttgaaacagttgagctaaaaaagagataaattgttaacacgataggggcgatcgggagagtcagcatagccttgtgctcattcatattccgatctccttgagctgtagtggctatctgagccatctcagtatagtgtagcggttagccacggccttcaggctgtgtgcgctgttgctccatgttgcaatagcagaactcgtcaagccagactgtcagcgaaccgcgctgcctgagtgtggctggccggtgggtgattttaaacttttgctttgccataggaacccgattctgaaacgatggcaatgatcagatccgcccatcttctgaaaatttgatttattcaacaacgccgagactgatagcaaactttctgcgtgatggcgcgcgtttatcaggcagaagattcgtcagcagtcgcatttattatattattcaaggagtgaattcgttatggaaattaaatttttatcattatgtattttagcgggtgttttatttgttagccaggtgaatgcttcagcgaacaacggtaaagatgatgtaaaatatgctgcgcttacccagaaggatcttgatgctttgcctgtggaaaaaagagcttcggttctggatgaactggggtttatccatgaatacggccttagtgtaccgatgaatcgcgaacgggcgttgcagtattacaagcaggcctgtgagcttggcggtaactacggctgttataatgtgaagtatgcttatcagtatggcgacggagtggcgaaagatagcgctcaggccaataagtatgctaagaaaatgaatctggataatttattgattgagcaagaatatattgataagttttcgcaagaaatttacatggcaaaagcattggccgatacggataaatcgcagcgggcggcatttattagtatactaattcatgctctaaataatagacccgagagcgatgcgcttttttttagccgtattggatttaaccaggaaaaaacatttcggctggctacgttatggtcgcaggatggcgacccgcaaatggattatcagatggggcgactcacccttaatgacttttccggtcgctatgcggacgagccttatcaagccagacctgcgtcattgaagtggtttcgcgccgccgcggaaaaaggcgtcgttgaggcccaatctctcttggggggtatttattcggggggagagggcgatgagtgggggattaagccagacattcaggaagcacaaaaatggtatggacaggcggctaagcagggggacagcgatgcacagattgcgttaggtaaaatctattattctggcgcaacagggcgcactgattacgctaaagcgctggcattatttacgcaggttgaaaatgatggtactaattcgcgctcaacgatgccgttgagttggatgtattataacggtttaggtactgcacctgattgtgataaagcctggtcgtattacaagaaagcatctcgatatgtaggtaagaaagttgaggaaaaaatatttttaagtaaatgcgcagcggatattcagagtcgaaaaaacaatgcggatgctttacctaaagtaaccctgaaaaaagagagaattttctctcgcgggataacggctaaaccgaaagaatgcgcactaatttttcagattggcacagataaaatccgtaacatggcgaatttgcatattacgcttgaactgaagaatgctgatggaatggcaactgaggaaacgttgatgattccgccattcggtttgaatactctggggatagatatgcaaaatcatgatgttgatcctctcgttaccccatacgatctcccgctgtatacgcaagatttttgtcacgggatcggcgatatccattttacgctgaaatccgctacggcaacgattaacggtaagaatgtcgatttactgaaagctgacagtgtgcgctttttagataaagaataagggaatgaaaaatgataaaacggaaatggaatcttttgcttctgcttgggctttctttcgcatcggtatgccaggcaggtgatgatattgacgcgttgtatagccgtattgcgcagaaagatattcaggcgctaaatgagctaaaagcgttagccaaagataataacgcccaagcgctggcagaactggggtttatttatgagtacggcgtttcagtatctgtggatattccgcaagcaataaagtactacgagcaggcttgtgatttggacggtgattatggttgctttaatgcggcttatttctatgaatatggcatcggtacccaaaaggacattacgcaagcgaaaacattagcaaaacagcttagagaaaaaattaatctatccaatatcaatctcgataaaaaggtgagtgaacgtataattgggagtgtttatagtaataaacttgaggcatatagagacctttcatttcgtcctcattttattcaaggcttaagtttctatttttatgccccgcaatcagatgagcgaaaactgctgagtcgaataggttttgactcatcacatcttgcgcggatagcgatactctgggcgagagagggtgatcctgaggtcgcgtatcagacggcaaaactggtctctactttgtattttaataatgaaacgaaaacgatagatattgctgaagcgctgaaatggctccgaatttcggccgagaagggggatgccgactcacagacgctgttaggttttctttatgaacacgccggattgggattacaaccagatggagagaaagcccggaaatggtatgaaatggcggcgcagcaaggtaatggagaagcattgtatacgttaggtcgtatgtactattctggcgtactggttaacgttgattacgataaggcgctgtatttttttaaaaaagcttatgagaaaaaattacaggaggccgctgattatttagcacagatgtattttaatggccagagtgtagatgtcgattgccaacaatcctggcactattacgataacagctatataaaaaagatgacacaacgcgattatcttgattattgtgaaaaagatcgaaagcgccgtaatgattttaatcagcaacttcctgagctgacattagaaaaatatgcgggattatttggcaggattgataatattcctctgtgtcagattggatttgttgtcaatacgaataagttaattcatgttgcgaacttacgtgtggaattgatattaaaaaatgatgctggagttagtgacgaaagaatggtcgcttttcctcctttgggtctcaatactctgggtgctgaacagggtatgggggattcttttaagtcgatgggatatctcttgatgaaaaacggtgacttgtgtgattaccataaacttactttcaccgtgaagtcagcgacggcaacaatcaatggtaaaaaagttgatttactgaaaacggataatttacatattattcagaatcgataactcgtggggcgttactgcctgatgaaatggataaaaaaaccgccgtttgtgacacggcggttttttcaatagcaacgcttgttaccagacgtaagtcagcagattctgcgaattcggcaccataaaatcaacggacatcatgatactcagcgcggtaatcgcaatgatagagaagccgaacagcttgcgcgcccagaccttatcatcttccactttgtaaccgcgtagcgccatgccgagccaccaaacgctgaccgccgcggcgaccaccaggtatttgtaaccggcataaccgcccaacgtgagcattagcgttgcaacggcaaacgcaatgatgtacagcgtgatgtggtttttagcgactgagattccttttaccaccggcagaaccgggatattggccgcctgatagtccttaaagcggaaaatggcgatggcgtaagagtgcggcatctgccagaggctgaaaatagccaacaggatcgccgcgccgctgtcaaagtcgcccgttacggcgcagtagccaatcaccggcggcgctgcgccggagagagaaccaatcagcgttccgtagacggagtgacgcttcatgtacaagctgtacacgccaacgtagaccacgaagcccattacccccagccagcaggccagaggattggcgccaaaccacaacagcataaagccagcaatacccagcagggtggcgtataccagcgagacgccaggagaaatcaggcctttgaccagcacccgattcttggtcctttccatcttcctgtcgatatccctgtcgatgtagttgttaaatacacaacccgacgccacaaccagtgacaccccgaccagcgtataaatgaacaggggatagtcaatgctgccctttgaggccagcagaaatcccccgatcaccgagatcaggttgccaaagatgatgcctggtttcgttacttgcaggtattgcttaaacatcatactcgccgctcttagtgcatcatcatgttgtagttgaggttccacataatccagatggagcccacaaccaggatggcgatgatcagcacggtaaagatgaaggccgtcatgttccagccttcatcagatttggtgttcatgtgcaggaaacacaccagatgcaccaaaatctgcaccactgccattgccaggatagatcccagaataacggccggagaggcagcgccggtcatcaccatccagaatggaataaccgtcaggatgaccgacaggataaagccggtcatgtacgtttttacgctgccgtgggatgcgccgccgctctcggtagaatgactcattacatcgcccccatcagataaacaacagtgaatacgcaaatccaaatcacatccaggaagtgccagaacaggctcagacacatgatgcgggtacggttagtgctggtcagaccgcgacgggcaacttgcaccatcagcaccgccatccagatcaaaccggaagtgacgtgcagaccgtgcgtgccgaccagcgcgaagaacgcagacaggaagccgctgcgatccgggcccataccgttaacaatcaggtgatggaattcatagagttccatcccgataaatccggcaccgaacaagaaggtcaacgccagccaggagataacctggctcttgttgttcttgtgcatagcgatcgccgccatgccgtaggtaatggagctaaataacagcaggaaggtttcaaccagaacgaacggcagttcgaaaatgtccttacctgtcgggccgccagcggtgccgttcaccagaacggcataggtagcaaacagaatagagaacagaatgcagtcgctcatcaggtagacccaaaatccgaagattttgttctggcctgcgtcatggtgcccgtgttcgtgcgcgtgggcagtcgcgtgcgttaaagtatcagttgccatttttcagccctgccttagtaatctcatcgaaatgctggttttccagtttttcgacttccgggaccggcacgtagtaatccacatcttcatcaaagctttttacaatccagctgatgatcatgcctgcgaaacccactatcgccagccaccagatatgccagatcatggcgaagccaaataccgtcgcgaaggcggcgataacaataccggcaccgctatttttcggcatatgaatctcttcatactgtccaggctgttggtacgcttcgcctttttctttcatttcccagaaggcgtcacgttcgtgaacgtgcggcacaacggcaaagttatagaacggcggcggagaagaggttgaccactccagcgtacggccaccccatgggtcgccggtcagatcgcggttctgatcgcggtcgcgaatagaaacgaagatctgaatcagttggcacaggatacccagcgcaatcagcgcggcgccggcggcggcaaccatcagcatcgtatggaactgcggatcaatttgctggctgaggcgacgggtcatgcccatgaagcccagtacgtacagcggcataaaggctacaaagaaaccgataatccagaaccagaaggcgcgtttaccccaggtttcgttcagcttgaagccaaacgccttcggccaccagtaggtcatacctgcgaagcagccaaacaccacgccgccgatgatcacgttatggaagtgcgcaatcaggaacagactgttgtgcaggacgaagtccgcgcccggtaccgccagcagaacgccggtcataccgccgaccgagaaggtcacgataaagccaatggtccacatcattgcggaatggaagacgatacggccctgatacatggtgaacaaccagttgaagatcttcaccccggtcgggatggcgataatcatggtggtgataccgaagaaggcgttaacgttcgcgcccgcgcccatcgtgaagaagtggtgcagccaaacgataaacgacagtacggtaatacagacggtcgcccaaaccagcgaggtatagccgaacagacgtttacgcgagaaggtcgctgcgatttcggagaataccccgaagaccggcagaatcagaatgtacacttccggatggccccaggcccaaatcaggttgatgtacatcatcatgttgccgcccatatcgttggtaaagaaatgggtgcccagatagcgatccagggtcagcaacgcgacggtaaccgtcagaatcgggaaagaggcgatgatcagtacgttggcgcacaaagaggcccaggtaaagaccggcatcttgaacattgtcatacccggcgcacgcatcttcaggatcgtcacgaagaagttgataccggttaacgtcgtaccaatacccgagagttgcaacgcccatatccagtaatcgaccccgacgctaggactgtactctattcccgatagcggcggataagccagccaccctgtctgcgcgaattcacccacgcccagcgagaggttaaccagaataacgccgacaacggtgaaccagaagctcaggttgttcaggaaagggaaagcaacgtcgcgcgcgccgatctgcagcggaaccaccaggttcatcagaccgataacgaagggcatcgccacgaagaagatcatgattacgccgtgagcggtaaagatctgatcgtagtggtgcggcggtagaaaacccgcttcgcctgcggaggcaagcgcctgctggctacgcatcatgatggcatcggcgaaaccacgtaacagcatcacaatcgcgacgatgatatacatgatgccgaggcgtttatggtcaaccgacgttaaccactctttccataggtaggtccacttaccgaagtaagtaatcgctgccagtatcgccagtcccccgacgataattgcagcgatcgttaccatgacgataggttcatggaacggtactgcatccagtgataattttccgaacatcttatcttcctcaacccttggagttggcggattccgcgtggctcatgtccataccttccattccttcatgcgagctgtgctcaccttcaggttgggtcatgtccatgctcttaccgtggcccatgaatttgttaataacgtccttgaacaaatcaggtttcacgctggagaaatattccaccttgttgtactcgcttggcatagccactttctcgaacgccgccatatcattcatggtgttcggagactgcttcgcttttgcgacccattggtcgaattctgcgcggtctttggtggcgatagctttaaacttcataccagagaagcccgggccgctatagctggcggagatgccatcgtaggttccgggttcgttggcgatcagatgcaaacgtgtttgcataccggccatggcataaatctggctacccagacgcgggataaagaaggagttcatcacggagttggaggtcactttgaaataaaccggcgtgttcgccgggaaggcgatctcgttgacggtggcgataccctgctccggatagatgaagaaccatttccagtccatggaaaccacttcgatggtgatcggtttttcgtcatgcgccagcggcttgcttggttcaagcgcgtgcgtggttttccaggtcagtacggcaaggaaaatgatgattaagataggcaccgtccagaccacggcttccactttattggagtgtgaccagttcgggctatacttcgcatccttattactcgcacgatacttccaggcgaaaccaacagccatcaagatggcgggaataacgacgatcaacatcaggccaaatgccgtcagtatcagcgaacgttgctccagtccaatctgtcctttgggatccagcagcgcagaattacagccactgagtaatgcagtgcctgcaattaatgacaaccatcccaaacttttattgtatttcctgagtctcatttaacgacctcaattccacgggacctggtggcgtttaaagtgtaggggcattttacggtaaggttacattactgtaaacatgattggttctgtgttaccaagttctgccgcgcatgtcacatatgttgccaagtatgtcgaaataactttaagacactgttgaaactttgcgttataacggatgaggtctgtaagtgggatgttgagggataattggtataaccaatgtaaaaataaaacaattacttaacaatttattatcaataaaaggacaatcaacggcagaaatttaaatttaatcggctgaatcgtgtaaagaaaataggtagcgtagaaattaccaataatttccaaaattctgttgcgcacaaaaagacaaatatattttttatcaattgatggttatttagccgttataattccgggtcgttattacaacggcaaataatgttttacagcaggcgtgtttttcgtagcgccaggtagtccagcaacccgccaaagacaatgccgcacacggcaaccactaccgcagtctcaagcaattcgggcaggaatgagaagttagtgtaatccaccgcgttcatggtcagcaggagtacccataccgccagcaaagcgacgcccgcgagcaggattgaaagcgcgaaattgtaggcgccacggtattgcgtgcggggaatgaaacgctcgctctgccagctatattccagcgtttgccgacagaccagcaacagtaacagcccgggaacggcggcgacaaccgagaagaggtagaatgtcggccagccgtgcgcttcaacgaaccagcccgctacaggaccaacataaacgcggcctactgcggagagggccgacagtagggcaaactgtgttgcggaaaacgacttattacatagcgtcattaataaggcgacaaaggcggcagtacccatcccgccgcacagattttcgaaaaagaccgccgcgcccatgctgaacatgtttttatcggtaatggagagcaaccagtaaccggcgttggacgcgccttgcaaaatgccgaaaatcagcagcgcgcgaaacagcgaaagacgctgcattaatatgccgccgtataacgcgccgacgatcgttgccaacaggcccagcgttttattgaccacgccaacttcaccagcgtcaaagccgacgccgcgaatcaaaaaggtggtggtcaggctcatagcgaaggcgtcccccagtttataaagcacaatgagcagtaaaatcagccaggcgttattacggccaaagaaatcgcgtagcggcgcgacgacggcctgttccagcgatttcggggacgggatagtatcggtcggttccggcgccagtaaggtggcgataatgcaggggatcaacaatgccgccatcagccagtacatgccctgccagccgagccagcgatcggccagccatagcgccagtccgccggaaaccagcatccccaaccggtagccaagcacgctgattgccgcgccagcgccgcgttcttctgcgggtaaaacatcggttttccaggcgtcgaacacgatatcctgcgaggcggagcaaaaagcaatcaccaccgccagcgccgccatccagcgtagctgcgtgccgggttcaagaaagcccatcgccgcaatcgccgccagtaacaacagttgggtggcgagtaaccaaccgcgacgacgacctaaaaaaggcggcgtgtagcggtccatcagcggggaccagagaaacttaaacacataggcctgaccaaccagcgagaagaagccaatcgttttaagatcgatattctcgacggtcatccacgcctgtagcgtaccggaggtgagcgccagcgggagaccggaggcaaaacccaatatcagcagaatggctgagcgcggttgctggaaaatacgtaaatattgacttgacataggcatctacagacccggcttctgccgggtcttgttgttgctattaacgggcgttttgcttgataaaatcgtgaatactggtgtcctgagacatatcagcaatggtatcggtcagaacgctattcactgcgtcggcaatattctggttagaggcctggaacgccccttcaatagagtagttggcgcgatagtttttggtcatcttgctgccatttgccgcggtcgcaataatcgcgatatccgctttggtcgcgatgttgtagcgcacgctgccctgggaaacatcagcatacagttggttaacaattatctgcagattaaccgcgccgttaggcccgatcatatagccccgcgccgtcatctgtttttccaggacttcttgtaacaggaagcgtaaatcgcgggaggcggttaacgttaccagctggttgttacgcgtgactttcgctaacgcttgatcctggcgttggtccgcgccggtaatgctaacggtgacgcccatcaggctcgggtcctgctgtggcaaggtgatcttcggcgcgacgtcaatggtcgtcggcggtgtggcgcatcctgccagcataaacagagcgactaacggaaagagaagtttttttaacatattcaggctctcaatgacgcttaaaacgtgataggtaaaaattcccgccatcataacaccgctaacggcgaggggaagtggtcaacgcaggtaaattcgtcgtaatgtccgatttggtattgataacggcgcgagcggggattttgagcgctaaaagaatgattaaggcagtaaacttcatacgtttggctgaaataatcagacgaaagctaaatttttgttgtcatgctgtaatggaaacggtaaaagcggctagtatttaaagggatgggtgacatcacagcgttgtcggaggagattttcatgatgatacgtgagcaaatagaagaaaaattaaggacagcgttcgaccccgtgtttctcgaagttgtggatgaaagctatcgtcacaatgttccagcaggatcggaaagccattttaaggtcgtgctggtgagcgatcgctttacaggcgaacgttttcttaatcgtcatcggatgatttacggtacgttaacggcggaactttccacaaccgtacatgcgctggcactgcatacttataccctcaaagagtgggaaggattgcaggatactatcttcgcgtcgcctccttgtcgcggcgcgggaagcatcgcgtagcaaaacggatttgcaactacctccgcttttccagtatgttgctacagaattatgtgaaaacggcctgcgggccgttttgttttgtctgaattttgagcgtgtcgtacagtattcagacaaaaattagccgagaattgtgaaaaccgccgcagcatcgcacaatcaccgttctcgactcacaaaagtgatgccgctataatgcgccgtcttatatatgaacgtcttcgggatgattctgacgacagggaatgtgattgattacgagaacatcccggttccgcgaagcaaatagcacgtgcttgcggagtagagttgaccgagcactgtgattttttgaggtaacaagatgcaagtttcagttgaaaccactcagggccttggccgccgtgtaacgattacaatcgctgctgacagcatcgagaccgctgtaaaaagcgagctggtcaacgtagcgaaaaaagtacgtattgacggcttccgtaaaggcaaagtaccgatgaatatcgtcgctcagcgttatggcgcttctgttcgccaggacgtgctgggcgatctgatgagccgcaacttcgttgacgcgatcatcaaagaaaaaattaacccggcaggcgcgccgaactatgttccgggcgaatacaaagtgggtgaagacttcacttactccgtcgagtttgaagtctatccggaagttgagctgaccggcctcgagtccatcgaagttgaaaagccggttgttgaagtcaccgacgctgacgttgatgtgatgctggacaccctgcgtaagcagcaggcgacctggaaagaaaaagacggcgctgctgatgcggaagaccgcgtgaccatcgacttcaccggctctgtagacggcgaagagttcgaaggcggcaaagcgaccgatttcgttctggcgatgggccagggtcgtatgattccgggctttgaagacggcgttaaaggccacaaagctggcgaagagttcactatcgacgtgaccttcccggaagagtaccacgctgaaaacctgaaaggtaaagcggctaagttcgttatcaacctgaagaaagttgaagaacgcgaactgccggaactgaccgaagaattcatcaaacgtttcggcgttgaagatggttccgtagccggtctgcgcgctgaagtacgtaaaaacatggaacgcgagctgaaaggcgcggtgcgtaaccgcgttaagtctcaggcgatcgaaggtctggtaaaagctaacgacatcgacgtaccgtctgcgctgatcgacagcgaaatcgacgttctgcgtcgtcaggctgcgcagcgttttggtggtaacgagaaacaggctctggagctgccgcgcgaactgttcgaagaacaggctaagcgtcgtgtagttgtcggtctgctgctcggcgaagtcattcgtaccaacgagctgaaagcggacgaagaacgcgttaaaggcctgatcgaagagatggcgtctgcttacgaagatccgaaagaagtgattgagttctacagcaaaaataaagagctgatggacaatatgcgtaacgtcgctctggaagaacaggctgttgaagcggttctggcaaaagcgaaagtgtctgaaaaagccacttccttcaatgagctgatgaaccagcaggcgtaatttttcgcgttaaaagcacgaaatttgcacaaaaacccgtcacctttcagtgacgggttttttttgtcacgtattttgcatggtaagggtgcgaaaaccgcgtttcagtgttagcgttagagcaaaagattgttatgcttgaattatggcgatgccgtacccattacagagggactggctgataatccgtccatcaggttacaatcagtacagcagattttttcaatttttatccaggagacggaaatgtcatacagcggagaacgagataatttggcccctcatatggcgctggtgccgatggtcattgaacagacctcacgcggtgagcgctcttttgatatctattctcgtctacttaaggaacgcgtcatatttctgaccggccaggtcgaagaccatatggctaacctgatcgtggcgcagatgctgttcctggaagcggaaaacccggaaaaagatatctatctgtacattaattctcctggcggcgtaattactgcggggatgtccatctatgacaccatgcagtttattaagccagacgtcagcaccatttgtatgggacaggcggcctctatgggggcgtttctgctgactgccggggcgaaaggcaaacgtttctgcttgccgaactctcgcgtcatgatccaccagccgctgggcggctaccagggccaggcgacggatattgaaattcacgcccgcgaaattttgaaagtaaaagggcgcatgaatgaacttatggcgcatcatacgggtcaatctcttgagcagattgaacgtgatactgagcgcgatcgcttcctctccgcgcctgaagcggtagagtacggtttggttgactcaattttgacccatcgtaattgatgccctggacgcaagtgtgccgctatacacttcatccttcacgctacctcggtgttggctgccagcgcgcctcccagtgacttacttatgtaagcgcctgcagagtcgacgagttgccgccttgatgtagctcgaatgattttgtgtatatactaatgaagggcggcacaacgctgattagcggcttgcgcctgagaatggcatttgcgtcgtcgtgtgcggcacaaagaacaaagaagaggttttgactcatgacagataaacgcaaagatggctcgggcaaattgttgtactgctctttttgcggcaaaagccagcatgaagtgcgcaagctgattgccggtccatccgtgtatatctgcgacgaatgcgtcgatttatgtaacgacattattcgcgaagaaattaaagaagttgctccgcaccgtgaacgtagtgcgctgccgacgccgcatgaaattcgtacccacctggacgattacgttatcggccaggagcaggcgaaaaaagtgctggcggtggcggtctataaccactacaagcgtctgcgtaacggcgataccagcaatggcgtcgagttaggtaaaagcaacattctgctgattggaccgaccggttccggtaaaacgctgctggcggaaacgctggcgcgcttgctggatgtgccgttcactatggcggatgcgaccacgctaaccgaagcgggttacgttggtgaagacgtcgagaatatcattcagaaactgttgcagaaatgcgactacgacgtgcaaaaagcgcagcgtgggattgtctacattgatgaaatcgataagatttcgcgtaaatcagacaatccgtccattacccgcgatgtttccggcgaaggcgtacagcaggcgttgctgaaactgatcgaaggcaccgtcgccgcggttccaccgcagggcggtcgcaaacatccgcagcaggagttcttacaggtagatacctctaagattctgtttatctgcggcggcgcgtttgccggtctggataaagtgatcgctaaccgtgttgaaaccggctccggcattggttttggcgcgacggtgaaagcgaagtccgacaaagccagcgaaggcgagctgttgtcgcaggttgaaccggaagatttgatcaaatttggtctgattcctgagtttatcggtcgtctgccagtggtagcgacgctgaatgaactcagcgaagaagcgctgattcaaatcctgaaagagccgaaaaatgcgctgaccaagcagtatcaggcgctgtttaacctggaaggcgtcgatctggaattccgtgacgaagcgctggacgctatcgccaggaaagcaatggcgcgtaaaaccggcgcccgtggcctgcgttctatcgtcgaagcggcgctgctggataccatgtacgatttgccatctatggaagacgtcgaaaaagtggtgatcgacgagtccgttattgccggtcagagtaagccgttgctgatttacggcaaaccggaagcgcaggcttctggcgaataattaaacattcatacaatcagttagccaaaaaaggggggattttatctcccctttcgtttttcctgtaaacacgccgttgaatgtgtgggaaacatccccatatactgacgtacatgttataggtggtatggagcacagctatactatctgattacctggcggacactaaactaagagagagctctatgaatcctgagcgttctgaacgcattgaaatccccgtattgcccttgcgcgatgtggtggtttatccgcacatggtcatacccttatttgtagggcgggaaaaatctatccgttgtctggaagcggctatggaccatgataaaaaaatcatgctggtcgcccagaaggaagcatcgacggatgagccgggtgtaaacgatcttttcaccgtcgggaccgtggcctctattttgcagatgctgaaactgcctgacggcaccgtaaaagtgctggtcgaggggttacagcgcgcgcgtatttccgcgctgtctgacaacggcgaacatttctccgcgaaggcggagtaccttgattcgccagccattgatgagcgtgaacaagaagtgctggtgcgtaccgctatcagccagttcgaaggctacatcaagctgaacaaaaaaattccgccggaagtgctgacgtcactcaatagcattgacgaccctgcacgtctggctgacaccatcgccgcgcatatgccgctgaaactggcggataaacagtccgtactggagatgtccgacgttaacgaacgtctggaatatctgatggcgatgatggaatctgaaatcgatctgctgcaggttgagaaacgcattcgcaaccgcgtgaaaaagcagatggagaaatcccagcgcgagtactatctgaacgagcaaatgaaagcgattcagaaagagcttggcgagatggacgacgcgccggacgaaaacgaagcgctgaagcgtaagatcgacgcggcgaaaatgccgaaagaggcgaaagagaaagcggaagcggaactgcagaagctgaaaatgatgtctccgatgtcggcggaagcgaccgtggtgcgcggctacatcgactggatggtgcaggtgccgtggaatgcgcgtagcaaggtcaaaaaagacctgcgtcaggcgcaggaaatcctcgatactgaccattatggtctggagcgcgtgaaagaccgcatccttgagtatctcgcggttcaaagccgtgtaaataaaatcaaggggccgatcctgtgtctggtggggccgccgggggtaggtaaaacctcgttgggccagtccatcgctaaagcaacagggcgtaaatacatccgtatggcgctgggcggcgtgcgtgatgaagcggaaatccgcggtcatcgccggacttacattggctctatgccgggtaaactgatccaaaaaatggccaaagtgggggttaaaaacccactgttcctgctcgatgagatcgacaaaatgtcttctgacatgcgcggcgatccggcttccgcactgctggaagtgctggatccggagcagaacgtggcgttcagcgatcattacctggaagtggattacgatctcagcgatgtgatgttcgtcgccacttccaactccatgaacattccggcgccgctgctggatcgtatggaagtgatccgtctgtccggttataccgaagacgagaagctgaatattgctaaacgtcacctgctgccgaagcagatcgagcgtaacgcgctgaagaaaggcgaactgacggtcgacgatagcgcgattatcggtattatccgctattacacgcgtgaagcgggcgtgcgtagtctggagcgtgaaatctccaaactgtgccgcaaagcggttaaacaactgttgctcgataagtcgttaaaacatatcgaaattaacggcgataatctgcacgactacctcggtgtgcagcgctttgattatggccgcgcggatagcgaaaaccgcgtaggtcaggtgacggggctggcgtggacggaagtgggcggcgatctgttgaccatcgaaaccgcctgcgtcccgggcaaaggcaagttgacctacaccggctcgctcggtgaagtgatgcaggaatccattcaggcggcgctgaccgtggtgcgtgcgcgcgcggaaaaactgggtattaatccggacttttacgaaaaacgcgatatccacgttcacgtgccggaaggcgcaacgccgaaagacggtccaagcgccggtatcgcgatgtgtaccgcgctggtttcctgcctgaccggtaatccggtgcgcgcagatgtggcaatgaccggtgagatcacgctgcgtggtcaggtgttgccgatcggcggcctgaaagaaaaactgttggcggcgcatcgcggcgggattaaaacggtcttaattccgttcgaaaataaacgtgacctggaggaaattccggacaacgtgattgccgatctggatattcatcctgtgaagcgcattgaggaagttctgacgcttgctctgcaaaacgaaccgtctggaatgcaggttgtaaccgcaaaatagtgacctcgcgcaaatagcgctaataaaaacagggctggcaggctatttcggacttgccagcctttttttgtatagctaatttagatggttgattgggtctgccaccattaacgggtgttgtaagggcgtggcaggcctgatataactgctgcgcggtcgtacttcgaaggattcaggtgcgatataaattataaagaggaagagaagagtgaataaatctcaactgatcgaaaaaattgctgcaggggctgatatctctaaggctgcggctggacgtgcgttagatgcgattattgcttctgttaccgaatctctgaaagaaggggatgacgttgcactggtaggctttggtacttttgctgttaaagagcgtgctgcccgtactggtcgcaacccgcaaacaggtaaagagatcaccatcgccgctgccaaagtgccgagtttccgtgcaggtaaagcgctgaaagacgcggtaaactaagcgttatcccctcgggggatgtgacaaagtacaagggcgcatcaactgatgtgccttttttattggcgattcgggactttctgtgcgttgcgggctgacaattgccctcgtttcttgtcacaataggcttttgtgcgccgcgttcagaaaatgcgatgcgcgtgaagtctctatacgcaaatcattcaggttgcgtcgacgcggcgactgagcgaatcactcggtagccagcggagaagccgcctgaaagataaagtgtaaagtcacctacagcggagtgtggttacaccatgatggacagcttacgcacggctgcaaacagtctcgtgctcaagattattttcgttatcattatcgtgtcgttcattttgaccggcgttagtggttacctgattggcggaagcaataactacgccgcaaaagtgaatggccaggaaatcagccgggcacagtttgagaatgcgtttaacaacgaacgtaaccgtatgcagcagcagttgggcgacaggtattctgaactggcggccaacgaaggttatatgaaaagcctgcgccagcaggtgctgaatcgtctgatagatgaagcgctgttggatcaatattcccgcgaactgaaactgggcatcagcgatgagcaggtaaagcaggcgattttcgccactcccgcttttcaggtggacggtaagtttgacaacaaccgctataacgcgattgtgaatcagatgggaatgaccgccgatcagtacgctcaggcgctgcgtaaccagcttaccactcagcaactgatcaacggcgtggccggtactgattttatgctgaaaggggaaaccgacgaactggcggcattagtctctcaacagcgcgtggtgcgtgaagccgttattgatgtcaacgcgctggcggcgaagcagcaggtgaccgatcaggaagtgtccagctactacgatcagaataaagtccgctttatgacgccggaacagttccgcgtaagctatatcaagctggatgccgcgacgatgcaggcaccggtcagcgatgcggatattcaggcctattatgaccagcatgtagatcagtttactcagccggagcgtattcgttacagcattattcagaccaaaacggaagatgatgcgaaagcggtactggatgcgctgaacaagggcgaagatttcgccacgctggcgaaagagaaatctaccgatatcatctctgcgcgtaatggcggcgatatgggctggctggaagagtctgccacggtgccggaactgaaaaacgccggattaaaagaaaaaggccagatatctggcgtgattaagtcgtctgtcggttttctggtggcgcgtctggatgatattcagcctgccaaagtgaaaccgttaagcgaggttcgcgacgacattgccgcgaaagtgaaacaagaaaaagcgctggatgcttactatgcgttgcagcagaaagtgagcgatgcggcaagcaacgacaatgagtcgttagcaggcgctgaacaggtcgctggcgtaaaagccgttgaaaccggctggtttagccgtgacaccttaccggaagagctgaacttcaaaccggtagccgatgctatctttaatggcggtctggtgggcgaaaacggtacgccggggccgaattcagacattatcaccgtggatggtgaccgggcttttgtcgtacgcgtgagcgaacataaacctgaagccgtgaagccgttggcagaagtgaaagaacaggtcactgccctggtgaagcataataaagcggaacaacaggcgaagctggatgcggaaaaactgctggtcgagctgaaagcgggcaaaggcgcggaagcgatgaaagcggcggggctgagttttggcgagcctaaaacgttaagtcgtaccagtcaggatccggtgagtcaggcggcctttgcgttaagccttccgacgaaagataagccagtttatggcgtggcgaacgatatgcagggtaacgtcgttctgctggcgtttgacgaggtgaaagcgggcgccatgccggaagcgcagaaaaaagcgatggtgcagggcatcacgcagaacaatgcgcaaattgtctttgaggcgctgatgagcaatctgcgtaaagaggcgaaaatcaaaatcggcgacgctctggaacagcagtaatcgtcgaggcgcttcgcaaaaaattgcaaaacgttgtatcccacaaaggccgctttcgcggccttttccatttctgagaattgccgtttgttcgtttttctccgccccgctatcgtggctgcactgttaacaaacaaggagaaaacagtatgaaacacggaattaaagcactgcttattacgctttctttaacctgcgcgggcatggcccatagcgcgctggcggcgacgcctgtcgcaaaaaatgcagcggtggaaacaaaagcggatacgccttcttcatcctccgccaaagcggcattacctgctaaagccagcgatgatgaaggtaccagggtgagcattaataccgcgtctgcggaggatctggcgcgggtgatgaacggcgttgggctgaaaaaagcgcaggctattgtgagctatcgggaggagtatggtccttttaaaacggtggatgatttaaagcaggtgccgggaatgggaagcgcgctggtggagcgtaatctggcagttttaacattgtaatcacttgcacagtggccaaaatttgccagactgtagaggtcataccagttatgacctctgtacttgtcgtttacttataacaacaacgtaaggttattgcgctatgcaaacacaaatcaaagttcgtggatatcatcttgatgtttatcaacatgttaataatgcccgctatctggagtttctggaagaagcccgttgggatggtctggaaaacagcgacagctttcagtggatgacggcccgcaatattgcctttgtggtggtaaacatcaatataaattaccgtcgcccggcggtattgagcgatctattgaccgtgaccagccaggtacaacagcttaacggtaaaagcggcgtattaagccagacgattacgctggagccagaagggcaggtggtggccgatgcgctcatcacgtttgtttgtattgatttaaaaacgcaaaaagcgctgccgctggaaggcgaattgcgtgaaaagctggaacagatggtgcaataacgcttcgcagtctgatggcgttgaacttgtccggcctggagatattgaccatggtgaatatctccaggccggataaggtgcgtgcgccgccatccggcaaaacaatcaccttaacccggttttttgcttcattgctgccatcaccgccgctttattcgacagataatgattcaggccgttagcgcgcagattacaggctgcgcaatgaccacagccatcgcctttaatgccgttatagcaggtcagcgtctcttcgcgaaccaaatccagttggccccaataatcggccagcgcccaggtttcagctttatcaatccacattaagggcgtttcgaaacggatatctttcgccatgcccagattcaccgcgtgattcagcgctttgacgaactcatcgcgacagtctggatagccggaaaaatcggtctcgcaaacgccagtgatcaccgcttcggctttaacctgataagcgtaaatcgccgccagcgtcagaaagagaatattgcgtcccggtacgaaagtattggggataccgtcagcgttcggttcatagtccggcaccggaatgctatcccgcgtcaggctgctgaccgccagttcgttcagcaaagtgacatccagcactttatgcgcgcgtgcgccaagttttaacgccagcgcccgcgcgacatcaatctctgcgcggtggcgctgaccataatcaaacgtgacacaatgcacttcatcatactgatgccgcgcttgcgccagacaagtggtggagtcctgacctccactaaatacaacaacggcgcgtttcatagttatcctgatcaatgacgaaagccaatatggtaacgcgtacggataatcccgaccagcttcttcacggcgaaggcggcggaagccaggcttcgctaaattcaaaccagccgcgaggggtgagtcgaacgccgttaacgcccggtggggcgctgatgcgatagtgataattaaatagtggcgtaagtgtggcgtcatccatcaggttagcaaaaacttgttgtagcgcggcgcggcgatctttttcattgggctgaatttgcagagcgtcaagcgtagcctgcagatgggaaaacgcaggcgcgtccaggacatgtgaccagatctgatcgcaacgtagccactgctccagcgtatattccggcgcttcgccgatcagcctgtcgcccatcatcagatccgcttgcgccaacgcagggcagttatcccagtttttggcattatgaaaaatcaacgttaactcacagccgagcgtcgccaggtaatgtcgaagctgttccgccatcgtatgcagctctacgggaaggtgatacgccagggtaagttttttcggcaatggcgtttcatcaacgtcctgccattgcgggattgtccagccgggtagcagcccctgacttggcataatcaagttctcatctaccggtaaggttttcagcagcgaagtatgatggataatatgtatcagacgccgcgcctgctgtacgttgagccgtgagccctttttgagggttaaataacaaaagccaagactgataccactacttacctgactcagcgtcgccagctcttccggtttgccgatggcaatctgcaccggatggcggcaactggtgcccagatcctgggcaaacagttgcggggtgatccagaattcaatcgctttcagcagcggatggctgaggtgataatggtcatgactttccagacgcaccagttccggcgtgaacaacgccaggcgaaaaggaccggtgccgataagcggcaggtcaggatgcgccagaccgctacaatagctcgccagacgatgcgccagccagtaatcaggtcggtgaaggagaaaggtcaggcactgaggatgcgttacttcgatccgtgcgacgctaataaacaatttgcttagcgcgggtagggtaagcagcctttccaggcgttcgtgtagctgcgcggtatccaccgcatcgccattatgccagtgcagcgtggagcgaatataaaaatcccagcgtaaaccgtcggcggaaacctcccagtgatgcgccaaatccccgcaaggatattgactgtcgcggtcgaagcgcgttaacccggaaaaaacttgccctgcgagatgctgttccgcgcggcctggcaggaaacccggctgcagcggatcaagcggacgatagtagggaatacgcaatgtcggcgtatcgttttgccattggccgcccataaaaggctggagcatcgcccgtaactcgcccggcgccagctgcgccagttccagtacgttgagctgctgccctttttccagcgcctgttccatcatggcggtgcggagcgattccggcgtgaccagaaactggagccgtccacgtttcccgcgcccggactgcgcctcccatcttagccaacctgcctgctgggcctgacgcagcagcgttcgcagatggcgctcgctacaaaaacagcgttcggccagttcgctaacggtgacatgttgcgtttccccggcggaaggctgccagaggcgttgatattgattaagccgattcagtagcctcatagaaacccggaacacttccttttatctgttcactattacttccgtatatctcaggtaatactgaacaacaagttaaccgcgtcacagtgtggagaaagagatggcccgtctggcagcatttgatatggatggcacgttattaatgcccgatcaccatttgggtagagaaacgatcgccacgctggcgcgtctgcgcgaacgcgatatcaccctgacattcgctacgggtcgtcatgtgctggaaatgcggcatattctggggacgctttcactggatgcttatcttattaccggtaacgggacgcgaattcactcgctggaaggcgacgtgctgcatcgtcaggatctcgatcctcaggttgccgatacggtgatgcaccatgcctgggatacccgagccagtatgcatgtgtttaatgacaacggctggtttacaggccaggagatccccgcgctactccaggcgcacgtctacagcggctttcgttatcaggttatcgatataaaaagcattccggcccatcaggtgacgaagatctgtttttgcggcgatcatgacgatctgatccgtttgcgcattcagctcaatgaggcgctggaagaacgcgcgcacctctgtttctctgccgtcgactgcctggaagtgctaccgctggggtgcaataaaggatcggcgctggcggtattgagcaaccatttagggctttcactggcagattgcatggcgtttggcgacgcgatgaacgatcgggaaatgctgggcagcgtcgggcgggggctcattatgggcaatgccatgccgcagcttatcgccgcgctgccacacctttcggttatcggacattgtggtaatcaagcggtatcacactttttgacgcattggctggacaatccgcatctaccttattcccccgaatgagagatctcttccagcaagccagacattcagtctggctttttttggtttctagtcgccggtaagtaattttgcgatggccgctgaccacggcgtcaaatcgccgatatggtcgctaacccaggccggatggtaataggtatccagatagcgatcgccgctatcgcacaataacgtcacgatagcgccggtttctccagcctcgcgcatccgggccgcaagctgcagagctccccacatattcgtgccggtagaggcgccgactttacggcctagctgcgtttccagccagtgtgcggtggcaacgctggcggcgtccggcacgcgcagcatctcatccacgacatccggaataaaagaaggctctactcgcggacgaccaattccttcaattttactgcctaccgggctgcgtaatgaagcgtcgcgatcctgccagtaaggtaaaaagacggaattttccggatccaccaccatgagctgagtatcatagccctggcagcgaatatagcgcccaatcgtcgcagaggttccgcccgttccggcgctcatgacgataaatcgcggtaccggatggagttcgttgcgcatctggcggaaaatactgtcggcaatattattgttgccccgccagtcggtagctcgttctgcgtaggtaaactggtccatatagtgaccgttcagttcatgcgccagccgctcggaggcggcataaatttcgcaggcgctctccacaaaatgacagtggccgccgtaaaattgaatctgttcgattttacgttttgcggtacaggcgggcatgacggcgatgaacggcagtcccagtaaacgcgcgaaccaggcttcggaaatcgccgttgagcctgatgacgcttcaataatcggagtgccttctttaatccagccattgcacaacccataaaggaacagcgagcgcgccagacgatgcttgaggctaccggtgggatgcgtgctttcgtctttcaggtaaagctggatacctggaaatgccgacaggggcaaacgaataagatgcgtatccgccgagcgctggtggtcagcgttaatttcattaatggcatttttaacccaattgctactcatcattaatatccatttatcattttgtgccaagagtagcgaaaagtacggaaaaaattgttgctatttgacctttaaattacaatgtaaggagaaaaatattctctatggagtgggtatgttagataaaattgaccgtaagctgctttgcttattgcagcaggattgtaccctctctttgcaggcgctggcggatgccgttaatctgacgacaacgccttgctggaagcggcttaaacgcctggaagatgacggtatcctgcttggcagggtcgcgctgctggacccggaaaaactggggctgggattaaccgctttcgtgttgataaaaacgcagcaccacagcagtgaatggtactgtcggttcgtgaccgtcgtctctgagatgccggaagtgcttggcttctggcggatggcgggggaatacgactatctgatgcgagttcaggtggccgacatgaagcggtatgacgacttctataaacgtctggtcaatagcgtcccaggactgtcagacgtcacctccagttttgcgatggaacagattaagtacaccacctctctgcccattgaataattctcccggtattgccggaaatcatatcaggaaataacgcgtgcgattatttgctcaattaagctggtactttcgccgggaatggcgtcgctatcttggcgcagtggccctgcttatgcttattgcgatgctacagctaatcccgcccaaagtggtggggattgtcgtggatggcgtaaccgcacagcagtttactccaggccgaatagcgatgtggattggcaccattgccctgatcgccgtagtggtctatttgttgcgctatgtctggcgcgtgctgctatttggcgcctcttatcaattagccgttgaactgcgtgaagattattatcgccagttgagtcgtcagcatcctgaattttatcagcgccatcggacgggcgatcttatcgcgcgtgcgacgaatgatgtggatcgcgtcgtatttgcagcgggcgagggcgttctgacgctggttgactcgctggtaatgggctgtgcggtactgattgtcatgtcgacgcaaattagctggcagctaacgctattagcgctgttgccgatgccgattatggcgctgatgatcaaacgttacggcgatcggctgcatgattatttcaaactggcgcaggccgccttctccagcctgaacgaccgcacgcaggagagtctgaccagcatccgcatgatcaaagcgtttggtctggaggaccgccagtcttcgctgtttgcggcggatgccgaagataccggcaagaaaaatatgcgcgtggcgcgtattgacgcgcgttttgatccaaccatttacatcgccattggcatggcgaacctgctcgcgattagcggcggaagctggatggtggttaacggcagcctgacgctgggcgaactcaccagctttatgatgtatctggggttgatgatttggccgatgctggcgctggcctggatgtttaatatcgtggagcggggtagcgccgcatacagccgcatccgcgccatgctggcggaagcgccggtagttaaggatggcgaagagccggtcccggcggggcgcggcgaactgacggcggccattcgtgagttttgctatccgcaaacgacgcatccggcgctggagaatgtgaactttcgtcttaaaccgggtcagatgctggggatatgcggtccgaccggcgcggggaaaagcacaatattgtcgcttatccagcgccattttgatgtgacgcagggagagatccgattccatgacatgccgttgacgcatctgcaactggatagctggcgtagccgactggcggttgtcagccagacgccgtttttgttctcggactctattgcgaataatattgcgctcggacgcccggaggcgactcaggaggagattgaacaggtggcgcgtttagccagcgtacatgaggatattctccgcttgcctcagggctacgacacgcaggtaggtgaacgtggcgtcatgttatcgggagggcaaaaacagcgtatctcgattgccagagcgctactgttaaatgcggaaattctgcttctcgatgatgcgctttctgcagtagatggccgcacggagcatcagattttgcataatttgcgccagtggggcgaagggcgtacggtcatcatcagcgcgcatcgtttatccgcgctgaccgacgccaatgaaattatcgttatgcaacatggtcatgttgttcagcgcggcgatcacgatcaactggcgcagcagattggctggtatcgcgatatgtatcgctatcagcaactggaggccgcgctggatgacgcgccggaacgcggcgaggaggcggtgaatgcgtagttttggacagctatggccgacgctgaaacggttgctggcgtatggctcgccatggcgaaaaccgctctctgtcgcggtgatgatgctgtggattgcggcggcggcggaggttagcggtccgctgctgatcagctatttcattgataacatggtggcccgccaccatttaccgttgggcaaggtcgcggggctggcggccgcctatgtggggctacaatttctggcggcgggtctgcattacgcccagtctttattatttaaccgggcggccgttggcgtggttcagtccttgcgcacggacgtcatggatgccgccttgcgccagccgctaagcgccttcgacacgcagcttgtcggacaattaatttcacgcgtgaccaacgatacggaagtcatccgcgatctgtacgtcacggtcgtcgcaacggtattacgtagcgcggcgttgatcggcgccatgctggtcgctatgttcagccttgactggcggatggcgctggtggcgattttgatttttccggcggtattgaccgtgatgatcatttatcagcgctacagcacgccgattgtacgccgcgtgcgggcatacctggcggatattaacgacggctttaacgaaatcatcaatgggatgagcgtaatccagcagtttcgccagcaggcgcgcttcggcgaacgcatgggcgaggccagccgctcgcactacatggcgcggatgcagacgctgcgcttggatggctttttattgcgtccgctgcttagcctcttttccgcgctcattttatgcggtttgttgatgcttttcagctttacgtctgccggcacgattgaggtcggggtgctgtatgcgttcattagctatttgtcacgtctgaacgagccgctcattgaactgaccacccagcaatccatgctacagcaggcggttgtggcgggagaacgtgtttttgaactgatggatcgcccgcgccagcgctatggcagcgacgacaggccgttacaaagcggggcgattgatattgatcatctgtcgtttgcttaccgcgacgataatcttgttttacaggacattacgctatcagtaccgtcccgtagctttgtggcgctggtggggcacaccggcagcgggaagagcacgctcgccagcttattaatggggtattaccccctgacacaaggcgaaattcggctggatgggcgagaaatcgcctctcttaatcatcgcgttttacgccagggcgtggcgatggttcaacaggacccggtagtgatggcggatacctttctggctaatgtgacgctggggcgcgatgtctccgaggcgcaggtgtggcaggcgctggaaacggtacaactggcagatctggcgcgcggcctgagcgacgggctgcatacgcatctcggcgagcagggaaatacgctgtccgtcgggcaaaaacagctattggcgctggcgcgcgtgctggttgacgccccgcaaatattaattcttgatgaagcgacggccagcatcgattccggcactgagcaggcgatacagcaggcgctggcggcgattcgcgagcgcaccacgctggtggttattgcccatcggctatcgacaatcgtggaggcggataccattctggttctccatcgcggccaggcggtggagcgcgggacgcatcaacaattgctggcggcacaaggacgctactggcaaatgtatcaattacagttagttggcgaggagttagccgccagcgtacacgaagaacccggccctgcggcgtaaggtttggcgccacagggcaaaacctcgcccatcatgcaccgtcgtggtgcgtttttctttccctgtttcgattttggggcgcgtcaatataaagacgcgccgctaaccgcgcttttcctcgctcgccagcttctggcacatcctttgcaatatccattcagaagagtccatgcgcggcggcagccgttacctaattctgactggagggttctatgaagctggttaccgtgattatcaaaccgttcaagctggaggacgtgcgggaggcgctttcttccattggcattcagggactgaccgtcaccgaagtgaaagggtttggccgtcagaaaggacacgccgaactgtatcgcggcgcggagtacagcgtgaatttcctgccgaaggtcaaaattgatgtggctatcgccgacgaccaactggaagaggtgatcgatatcatcagtaaagcggcttacaccggaaaaattggcgacggcaaaattttcgtcgcggagctcatgcgcgttattcggattcgtaccggcgaagctgacgaagcagcgctgtaagacccgccacacagcaacaggaaatgaaaaaatgaagatagcgatgataaaaaccacactggcttcactggcgctgctgcctgggctaacgatagccgcgccggcggttgccgataaagcggatagtgcttttatgatgatttgcaccgcgctggtgctgttcatgacgataccgggtatcgcgctgttttacggcggattaattcgcgccaagaacgtgctgtcaatgttaacgcaagtgaccgtcacctttgcgctggtctgtattttatgggtggtgtacggctattcgctggcttttggcgaagggaatcattttttcggtaatgccgatggggcgatgttgaagaatatcgcgttgacggcggtaacgggtacgatttatcagtatattcatgtcgcgtttcagggatctttcgcctgtattaccgtcgggctgattgtcggcgcgctggcggagcgtattcgtttttcggcggtactgatttttgtcgtggtgtggttcacgctctcttatatcccgattgcgcacatggtgtggggcggcggcctgctggctgctcacggcgcgctggattttgctggtggtacagtggtgcatattaacgccgctatcgctgggctggtgggggcttatttaattggcaaacgcgtcggctttgggaaggaagcatttaaaccccataacctgccgatggtctttaccggtactgcgattctgtatatcggctggtttggatttaacgcgggttctgccggtagcgcaaacgagatagcagcgctggcctttgtgaacaccgtggtggcgaccgccgccgcgattctggggtggattatcggcgagtggacgctacgcggtaagccttccctgctgggagcgtgttccggcgcgattgccggtctggtcggcgtgacgccagcctgtggctatgttggcgttggcggcgcgctggttatcggcgttattgcgggtctggcgggattgtggggagtcaccatgcttaaacgtctgctacgggtagatgatccgtgcgacgtatttggcgttcacggcgtttgcggaatagtcggctgtatcctgaccggcgtttttgccgccagttcgctgggcggcgttggctttgtcgacggcgttacgatgggacatcaggtgatggtacagctggaaagtattgctattacggtcgtctggtccggcgttgtcgcgtttgttggttacaaactggcggatatccttgttggactgcgtgtaccggaagagcaggagcgcgaggggctggatgtgaacagtcacggcgagaatgcgtataacgcgtgattgcgcaacatgcctgatggcgctgcgcttatccagtttaccgtaggccggataagcgcagcgtcatcaggccattaacgccgcatagcggcatgttttttaattgtgattgcgcattaccccttcctgcacggttgaagcgaccagcgcgccatcctgagtataaaactcgccgcgaacaaagccccgggcgctggaggcggaagtgctctccacgctataaagtagccattcattaaaattgaacgggcgatggaaccacatagagtgatcgatagtggcgatctgaatgcccttttccagaaaaccgatgccgtgaggctgaagcgcgacgggaaggaaattcaggtcagaggcatatcccagtaaatattgatggacgcgaatgtcatccggaacggtgccgttggcgcgaatccatacctgacgcacaggcgcggcgacgtgacctttcaacggattgtgaaattcgacgggacgaatttccagcgggcgatcgcagagaaacttttctttcagaatcggcggcagtaaatgcgccagcgattgcgcgatttccgtttctgacggtagtccttccggcccgactaccgtcggcatggttttttgatgttcaaaacccggttccggcgcctggaatgaggcggtcatgtaaaagatgggtttcccgttctgaatagcggcaacgcggcgggcgctgaagctattcccatcgcgcagcacttctacgtcatagataatgggtttttggctgtcgcctggccgcagaaaataactgtggaatgaatgcaccagtcgcgcttccggcaccgtttctttggcggcatagagcgcctggcccaccacctgaccgccaaatacctggcgcagccctaagtcttcactttggccccgaaagagtccttcttcaattttttccagattcaataatgtcagcaaattattcagtgtctgactcatacatactctccaggtgacaacgatgccgaagcgaggtagggcagagtataacgcaattttgcaagtggtccgatgggtacaaaagtctgaataacagaccaattccaggcaaaaatgagtgacatgtgccacacttaatcacgttatgtttctgttaaccactcttccggcggggggaaaggcctgctggtgcattgatgataaggagaattgaatgaaactcgtgcacatcgtaagtggtttagcggttgcgatatctctggcggcctgcgctgataaaagcgctgatatccagacgcctgcgccaaaccctaacatgtcgattacagctaaccagtctactattcagcaacccaatgtttccggtaccgtctggatccgccagaaggtcgctctgccgccagatgcggtgctgaccgtgacgctttcagatgcttcgctggctgatgcgccgtctaaggtgctgtcgcaaaaagcggtacgtaccgaaggtaaacaggcgcctttcagttttgtgttgccgtttaacccatcagatattcaacctaacgcgcgcatcctcctgagcgcggccatcaccgttgataataagctggtatttattaccgatagcgtgaaaccggtgattaataatggcggcactaaagcggatctgacgctggtaccggtacagcaaacggcggtgcctgtgcaggccagcggtggtgcgacgacgacggttccatcgacttcgccgacccaggtcaattcgtcttctgccgttcctgcgcctacccagtattaatcctgcgccaaccctctccgttacggagagggttaatacacccagcgatagcgttgtaaatcgatttgtccgcttcccgacaccaccacgccttccgccagtaatgcctgacgttgccgctgtagatccggcccggtaagtgatattgcgccgtggcggttcaccacccgatgccatggtaaagtgctgccttccggcagacgttttaaaactccgccgacctgacgcgccgcccgaggcgaaccggcaagccgggcgacatcgccgtaggtcgtgacaaacccttccgggatcgaggcgacgatttgccagacgcgttgaggaaatgtgtcctgaatatccataatagaatcctgcgttaatgcttcaggataatctggaataaggggggaggaaagcccggatgcgcaagaaaccagcatccgatgcctgatgggttgcaattgcacgatatagcagtgataatgcgcctgcgcgttggttcacaacgctctcaatgggggctctgttggttctcccgcaacgctactctgtttaccaggtcaggtccggaaggaagcagccaaggcagatgacgcgtgtgccgggatgtagctggcagggcccccacccatttgtgcctctccacactgttcttttctgctgtgcgacgttatagccgctgttccgcccaaagaataaatgccgtagcgggtaggggtttactgtataaccagccctgaccataatgtacgccatgctggcgtagccactgttcttgcctggccgtttcgatgccttctgcgaccatcttaagtttgagcgttttcgccatttcaataatatgcggcgtgacgtttttatattccagcgcatcgacaaaagatttatcaattttaaggacatccacatccagattttgtaagtagctgaggctggaatagccggtgccaaagtcatcaatataaattgaatgtcccgcgttacggtatctggcgacaatgggcgcgctggttttcggatcggcgaactcgcgttccgttaactcaagcgcgatttgcgacggagaaatttggctacggttcagcagcgtgcttaacagcgtcggcaacgtttccgacgccagatcggatgcctcaagattgattgaaatatgttgttcgggatgggactttaaccaactccccatgtcttcaaaaacggtgtcgatgattagccgggttagcggctccgtgagcccggtttgttcagccagcgcgataaaaatttccggcgaaaggaaggtgccgtccgcctgttgccagcgagctaaggcttcggcaccgacaatttttccgctgctcagggagacaataggctgatagtgtacgttaatttcgcgattgtctatcgcatcctggagacggtggcggggcgactgtagtcgacgcaaaatacgcagaataaaggccgcggccagcagacccgttacgatgcccgccggtagccagataaacgcctgtcgataccagctcctttccagcggagcggtcggtgcccagcttacgatagtaatgcccatttccggaaaggggtggatagcatactgaatgcctcggttttccagccgcaggggcgtctcatggtgaatgagcggaagaatagcggggtcaaggttaccgctgctggcaaccacagtattgcgttcccggccaataatagcgacgtcaatcggccatgcgccaaacggaatcacatcgataaaggacgccgggtcgatcatcacgatatagctgtcgctcccgagtgccgccatatagcgttttatacccagatcgttttgcgccgtaaaccaggcgcgataaccgtcgcgagtgattttcatgggcggagggaacgcgggaatatggctctctttttcaagtgaggagcaaacgggaatcgaatttttaagatacagaacttcctggacataccgaaagctataagacacgcggcgcatggcgagtaaatgggcactgctgcagggctcgcctttaaaggaggcaatatgcgttaacgcggcttttgcctggtcactgaccctttctgtacgtagcgccacccgggacgagaagatatccagctcttcattaaacctcttttcaacttgacggtgcgccagccacagactcaatcctatcgggaaaaggacagacaggataagcactcccgttaccaggctgaccagatgtcgtgttgtcacagtgatgtccttataaacacagcgtagagaaagtatatccgatcgtaaatcgcgccctcgaatgataaagctattttatcgattttacagattcaggcgccaggctaacgcgttacgccacgttgcttttgccgccaggaagagatcgtgaatgtttaccggttgaaaaaggagcgttgatagcgtattttattgttatgttataacataattgagagggcgcaatgaaacctgatattcatcctgtataccgcaccgtcgtatttcacgacaccagcgcaaatgaatatgtgaaagtgggatcaactatcaaaactgaacgtgaaatcgaactggacggcgtgacatatccgtatgtcactattgatgtgtcatcaaaatcgcatcctttttataccggtagacagaaaacgtttgatagcgaaagtagcgccgcacgcttccagaaacgtttcggtcattttatcggcgctaaacgggggtaaatgaaatgcaggtgttaaactcacttcgcaatgcaaaacaacggcatccggattgccagatagtcaaacgcaaaggacgcttatacgtgatttgtaaaacaaatccgcgttttaaggcggttcaggggcgtaaaaaaagacgttaaaaaaccaacagttcagggaaagcagtgcgtaccagggagggtgcgcacttttttattaccggctggcttctgcgcgggccagcgtaaaaatatcgtagaaggaaagttcgcccttacgggcaaccattttttgcagctggactttatgttcattatccacctgtggagactgaagaatcgtctcaatgagcgtggggggaacaaagcgggtgttgtaccattcgccgttgtaacagacccggaggtccagcacatcgatgtcgttatagtgataacgcggggcgatgtcgaaaaagaagaagccattaaatgcgataaataacaccactaacagccacactgaccccaccagcgtttctgattgcagcatgaccgccagcgtcgcaaaccaggctgcatacatcgcgataaataacccaggatgcttgcggataaaactgatactaaaacgcggcctgttatcgcgtttttcacggatgtttaagtcatcaatagtttcgctaagcaggcgctgtatctctgtcatcttttgccttcatgatttctgcgacataggggtagtaacagcccattttaaagggaggtgtaacgtgaaaaaagtaacagattaaccacgaattagcataacagttatcattttgactacaattttttaatgattcgcgccggatttccgcctaccacaacgtctggcggtacgttttttatcaccacagcgcctgaagcgacgacgacgttatcgccgatggttacgcccggattaacgacggctcgtccgcctatccagacattatttccgatagtgacgggtttacctaattctctgccgctgttgcgttcgacggcgtccagcggatgcgtggcggtatagatatgtacccctggcgcgagcatacaattatcgccaatatgaattgggcaaacatcaagcatgacgcagtcgaagttagcgtaaaaggagtgaccaagaaaaatattatagccgtagtcgcaacggaaggaaggttcaatataggcgtcttcgcatcgacccaacaggtcgcgtaaaatcgcctgacgcttatttatttcatcaggcgtagtataattgtattgatggatgagttgacgcgcccgcagtcgatcctggcataaagtttcatcggtcgggcaatacagtgccccagcgatcattttttgtttttcgtcactcatcgcgcgctccccttggtggatattatcgcaatagaagcaataataaagtattagagggaacgttccctgctattgctatgtgatctatatcactgttctataatagcccgttgtgttattagccagaacgaggaggcagataacacctgcgtgttctctaaaaagtaatgtagcgtgattaacgaatgaatttccatactgaagaggggatcttgtcgtagagtttgttcatcgtcaattctgcaagacggtgatccgcagctgagtaaaatacagccagctcattgtcggacaattcatatttatttttctcaatgacgcgctccagagtgtcaattgtctgacagcgccgtaaacgcatcaaataatcagttttagttaatggtttatcagacataaattctacctatgattgtaataatttttaacaagacaaactaacaggattggccctggtggcgttgacgaaacaacggaacaggcggttgcccgatttacgccatttttgcaaatcctgcgtattaataccatagctgctgaacaacataaaggtgtcgtccaggtattcatctatctgcgcaatcaatttattgtcttcattgtacttaattttataattaagcgcgaaagttgcaatatgctctatcagctcattgagctgcaggttgactgctgaggtcgggtcattaacccagccatggttgctttcttcaaggtttgcaagacagtcatgatacagggtttcgcaaagaaatttaagctgtgctatatcatgtcttttgggtgagtattcgtccataatgcatcccctttttagtggcttaaactaaccgaacaccttcgggatggatacaactaactaacctggtacttcccacgtcaccttatgatttaactataatctactctaaaaaacttttcatcgtcatattactaaaaattacaattgcgtgaaagccgcgtgttgccatactttttcgaattttaacagtgatcgtcggtcgcctaaaaaggaaccagttttattgtttgtgtaatcattgggttaacgttttttagcttttcaggctaaaacaatagactctgacaggagaaaatagccaggaatattcttaatatttcttaattaatggctgaattaagaaatggccaactttcctaagaaaagcctttaacgcagtaaggattataccttttattaatatggcaaaaaataatcaatctaacaataagcgtattttatgatttttgcgtaaaaaaggccgcttgcgcggccttatcaacagtgagcaaatcagcgatgttctgtcgaatgactatgctcaatatcttcgcttttacggctaaagcggcggcgtaccaccacgaagaagaccggtacgaagaaaatagccagtacggttgccgttaccatcccgcccagtacgccagtacctaccgcattctgcgcgccggaacccgcgccggaactgataaccagcggcataacccccagcatgaacgctaacgaggtcatcagaatcgggcgcaaacgcatccggacggcctccagcgtcgcttctaccagacctttcccttctttatccattaagtctttggcgaattcgacgataagtatcgcgttcttcgccgacaacccaatggttgtgagcaggcccacctggaagtaaacgtcgttagtcagtccgcggaaggtcgcagccagcagcgcgccgataaccccaagcggaacaaccagcattacggagaacgggatagaccagctctcatacaatgccgccagacacaggaagacgacgatcagcgatatagcatacagggcaggggcctggttgccggacaaccgctcctggtaggacatcccggtccagtcatacccaatgcctgacggcagcttgctggccagttcttccatcatcgccatcgcttcaccggtactcttgcctggcgccgcctgccccagaatttccatcgaaggcagaccgttatagcgttccagacgcggcgaaccatattcccagcgggaagaggagaatgcggagaatggcaccatctgaccatcgctaccacgaacgtaccagtcgttaatatcatccggcaacatgcggtatttcgcttcggacatcacgtaaactttcttcacacgaccgcgatcgataaagtcgtttacatagctgccgccccatgctgcgcccagcgtggtattaatgtcgctaatagatacgcccagcgcctgagctttttcctggtcgatatcgattttaaactgcggcgtatcttccagaccgttaggtcgaacgccgaccagcagatcaggatatttcgccacctcgccgaacaactgattacgtgcctgggtgagtttttcatgaccaagtcccgcctggtcaatcaactcgaagtcaaagccggttgcggtgcccagctcaacgatcgccggcaggttaaaggcgaagaccatcgcatctttaatttgtgaaaacgctgcggttgcccgctgggtaatcgcttcaaccttgtttttttcgcctggacgatcggcccagtctttcaacgacacgaatgcaataccggtattctgaccgcgccctgcaaaaccgaagccgttgacggcgaataccgattcaacgttggctttctctttgttcagatagtaatccgtgacctcatccagcactttttgcgtgcgctcttgcgttgcgcccgcggggagctggaccattgtcaggaatacgccctggtcttcatccggcaagaaagagcttggcagacgaacgaacagataagccataccgacgacgataatgagatagagcagcagataacgcccggtgctgcgcagaatattgcctacgctatcggtgtagtgatgcgtgctcttatcaaacaggcggttaaaccagccgaaaaagccttttttcccttcgccatgatcgcctttggcgacgggtttgagcatcgtcgcgcacagcgcaggcgtcaggatcagcgcgaccagcaccgacagcgccatcgccgatacgatggtgatagagaactgacgataaattgccccggttgagccgccaaagaaggccatcggaataaataccgccgacagtaccatcgcgatacccaccaatgcgccctgaatctggcccatggatttgcgcgtcgcttccttcggcggaaggccttcttccgtcataacacgttcgacgttctcgaccaccacgatggcgtcatccaccagcaagccgatggcgagcaccatcccgaacatcgtcagcgtgtttatcgagaaaccgaatgccgcaagcacggcaaaggttcccaacaacaccaccggaaccgcaatagtcggaatcaacgtcgcgcggaagttctgcaggaacaggtacatcaccaggaacacgaggataatcgcttcgaccagcgtttttaccacttcatgaatagagatcttcacgaacggcgtggtgtcatacgggtagacgattttcatccctggcgggaagaacggttccatttttttcagttcggcacgaatagcggtagcggtatccagcgcgttggcgccggtagccagtttgatgccaagacctgacgctggctgaccgttaaatttcgcaatgacgtcgtagttctcgccgccaagctcaattttcgctacatcccgcagacgaacctgggagccatcctgattcactttcagcaggattttgccaaactcatccgttgaggtcagacgcgtttgggcaataatcgatgcgttaagctgctggcctttaaccggcggcgtaccaccgagctgacctgccgcgacctgggcgttctgcgctttgatcgcgttaatcacgtcgaccggcgtcagttggtatttggtcagctctgtcggattcatccagatacgcatcgcatattgcgaaccaaacagctggacgtcgcccaccccagaggtacggctgatcggatctttcatattggcggcaacgtaatccgaaatatcctcctgggtcatggtgccgtcggtgttaatgacgcccactaccatcaggaagctacttgaggacttctcaacgctcacgccctgttgctgtacttcctggggaagtaacggcattgccagttgcaacttgttctgaacctgaacctgcgcgatatccgcatcggtgccggattcaaaggtcagcgtgatctgcacggtccccgtggagtcactgttggaggacatatacatcaggttatcgataccgttcatattctgttcgataacctgcgtgacggtatcctgtaccgttttcgcatcagcgccagggtaggttgcggagatcgtcactgctggtggcgcaatcgtcggatattgcgctaccggcaatttgaggatcgcgagcccccctgccaacatgatgatgatggcgatcacccacgcaaatatagggcgatcgataaagaaattaggcatgtcttaacggctcctgtttaagttaagacctgggctgagcaggttgatcaccgcttgcggcttgctgtttgttatccgcggtaatttcctgtactttaacctgtgcgccaggacgtactttttgcagcccgctgacgactacgcggtcgcccgctttcaatccgtcagtcaccagccacttatcgccgatcgcctggcttgcgacgatttggcgggtttccactttgttatcagcgccaaccaccagcaccgtggcatcgccgcgtggagtacgggtaacgccctgttgtggaaccagtaatgccgtcggttttgtcccttcctgcagacgtgcgcgaacgaacattcctggcaataaggtgtgatccgggttagggaagatggcgcgcaaagtaatagacccggtggtttggtcaacggtcacgtcggagaactcaagcgtaccggactgcgggaatttgataccgtcgctggtcaccaggtcgaccttcgctttgccgttttcctgtttcagcgaaccatttgccagctcctgcttcaggcgcaggaagtcattgctggactgggtcacatcgacataaatagggtccagctgctgcactgtcgccagcgccgacgcctgaccgttctgtaccagtgcgccttccgttacggatgacttaccaatacgaccgctaatcggcgaggtgactttggtatacgccaggttgatacgtgcggtttcaacggcggcttttgctgcgacaacagcggcagtcgcttgttgtgcgtcagccagcgcctgatcgtattcctgcttactgatgtactgcgtacccagcagcttttgataacgcttcaccgtcagttcagcgatattcgcggcggcctgcgcttttgccagatcgcccttagcgctgtcgtaagtcgcctggtaggtcgcaggatcaatctgatagagagagactcccgcttcgatatcacttccctcaacgaaattacgcttcaggataatgccgcttacctgcgggcgaacttcggcgatacggtaagcaacggtacgacccggaagttcagttgtgatttgcagtggttccgtttttagtgtgacaaccccaacttctggcatctgctggccgccttgctggtcctgtttgtcgtcacatcctgttagcgctaagctgcctgagagcatcagaacgaccgccagaggcgttaaccctctgtttttgttcatatgtaaacctcgagtgtccgatttcaaattggtcaatggtcaaaggtccttaaacccattgctgcgtttatattatcgtcgtgctatggtacatacatccataaatgtatgtaaatctaacgcctgtaaattcaccgacatatggcacgaaaaaccaaacaacaagcgctggagacacgacaacacatcctggatgtggccctgcgtttgttctcgcagcaaggcgtatcggcaacctcgctggcggagattgcgaacgctgctggcgtgacgcgcggcgcaatctattggcatttcaaaaataagtcggatttattcagtgagatctgggagctatcagaatccaatattggtgagcttgagattgagtatcaggcaaaattccccgacgatccactatctgtattaagagaaattttagttcatattcttgaagctactgtaacagaagaacgacgccgcttattgatggagattatattccataaatgtgagtttgtcggagaaatggttgtggttcaacaggcgcaacgtagcctttgtctggaaagttacgatcggattgaacaaacgttaaaacattgtattaatgctaaaatgctgcctgaaaatctgctgacccgtcgtgcggcgatactgatgcgcagctttatttcagggctcatggaaaactggttatttgctccgcaatcgtttgatttaaaaaaagaagctcgcgcctacgtcacgatcctgctggagatgtatcaattgtgtccgacgctgcgcgcgtcgacggtcaacggctccccctgataatattccaggaaaactcctggacattttctgtgtcgctattctgtttgttacaggcgtgatattcttgcgactcaattatttccggtctgcttgccggttcagacacttcattctcatgactatgttgcagctttataaacgttcacagcattttgtttttattacaattagcgtccttattatcctgctgtcctgtcagtctctggcatttgcccgggggcaaacgaatggcgacctgccgtcaaaagcggatgtgcaaaaccagctggatacgctgaataagcaaaaagatctctccgcccaggataagctcgtccagcaggaccttattgatacgttagctacgctggagaaaatcgagcgggtgaaagaggagaccgtacagctacggcagaaggtggcgcaggcgcctgaaaaaatgcgtcaggcgacggctgcgttgaatgcgctgagcgacgtcgataatgatgatgaaatgcgaaaaacgctgagtgcgctttcgctacgtcagcttgagctgcgcgtggcgcaggtactggatgatttgcaaaattcgcaaaacgatcttgccgcttataacagccagcttgtttcgctacagacccagcctgagcgcgtgcaaaacgccatgtataccgcctcacagcaaatacagcaaatccgtaaccgtcttgacggcaataacgtcggcgaagctgcgcttcgccccagccaacaggtgttattacaggcacaacaggcgctgcttaatgcgcagatcgaccagcaacgcaagagtcttgaaggaaataccgttttgcaggacaccctgcaaaaacagcgggattacgtgacggccaacagtaatcgccttgaacatcagcttcaacttttacaggaggcggtcaacagtaaacgacttacgctaacggaaaaaacggcccaggaggccatttcgccggacgaaacggcgcgtatccaggcaaacccgctggtaaaacaggaactggatattaaccatcaactcagccagcgtctgattgtcgcgaccgaaaacggcaatatgttgatgcagcaaaacattaaagtaaaaaactggctcgatcgcgcgctgcagtcggaaagaaatatcaaagaacagattgccgtcttaaaaggcagcctgttgctgtcgcgtattctttatcaacagcagcaaactctgccctccgccgacgaactcgaagatatgaccaaccgcattgcggatttgcgtctggagcagtttgaaatcaaccagcagcgtgatgccttattccaaagcgatgcctttgtcgacaagctggaggaggggcataccagcgaggtgaatgatgaagttcatgatgcgttgcttcaggtggtggagatgcgccgtgagctattggatcagctaaataaacagttgggtaaccagctgatgatggcgattaacctgcaagttaaccagcagcagttgatgagcgtctcgaaaaatctgaaagccattttgacgcagcagattttttgggtgaacagtaaccgccctatggactgggactggcttaaagcgttcccccaaacgttaaaagagcaattcagcgccatgaaaatcacggtgaactggcaaaaagcctggcccgcggtatttattgcttttttggccgggttgccgctcttgctcatcgccggtttaatccgctggcgtctgaaatggttaaaagcgtatcaacagaagctggccgccgccgtgggatcgctgcgtaacgatagtcagctcaatacgccaaaagctattctgatcgatctgatccgcgcgctgccggtgtgcctgattatcctcgcgcttggactgatcctgctgaccatgcagctaaatatcagcgatctgctctgggcctttagtaaaaagctcgcgatgttctggctggtctttgggctgtgctggaaggtgctggaaaaagagggcgtggcgatacgccattttggtatgccggcgcagttgaccagccactggcgtcgccagattgtacgcattagcctcgcattgctgccgctgcacttttggtctgtggtggcggagttgtcgccgctgaatctgatggatgacgtgctggggcaggcggttattttcctcaatctgctggtcataacattgctggtgtggccactgtgccgggaaagctggcgcgataaagaatctcacggcattcgactggtgaccgtgacgattctttccattattccagtggcgttaatggtattaacggcgaccggctatttctataccaccctgcgcctggcggggcgctggattgaaaccgtctatctggtcattatctggaacctgctttatcaaacggtgctgcgcgggttaagtgtagcggcgcgccggattgcctggcgacgcgcgctggctcgtcgtcagaacctggtaaaagagggtgcggaaggcgcggagccacaggaagaacccaccatcgcgctggagcagattaaccagcaaacattacgtatcacgatgctgctaatgcttgccctgtttggcgttatgttctgggcgatttggtccgatttgatcaccgtattcagctatcttgatagcattacgctgtggcactacaacggctccgaagctggcgctgcggtggtgaaaagcgtgacgatgggcagcttgctatttgccattattgccgcgatggtggcctgggcgctcatccgcaacttacccggcctgctggaagtgctggtgctttcacgcctgaatatgcgccagggggcttcgtatgcgatcaccacgatccttaactacgtcattatcgctgttggcgcgatgacagtattcggatcgctcggcgtctcgtgggataaactccagtggctggcggcggcgttgtcggtgggtctcggctttgggctacaggagatcttcggtaactttgtctcgggtttaatcatcctcttcgaacgtccggtacgcattggcgatacggtaacgatcggcacctactccggcacggtcagtaagattcgtattcgcgccaccactattaccgattttgatcgtaaagaagtgatcattccgaacaaagcgttcgtaacggagcggctaattaactggtccctctccgataccacgacacgtctggtgatccggcttggcgtggcttatggctcggatctggagaaagtgaaaagagtcttgctacaggcggcgatggagcatccgaaggtgatgcacgatccggaacctgccgtattcttcaccacctttggcgccagcactctggatcatgaactgcgtctgtacgtgcgtgaattgcgcgatcgtagccatacggtggatgaactgaaccgcgcgatcgatcgactgtgccgtgaaaatgatatcaatatcgcctttaaccagcttgaggtgcatctgcataacgcgaagggcgacgaagtcactgaagtgaagcgcgatctcaacggcggcgatctggcacctacggcaagctaaaaggcggtgggccgcgcgctttatgagtgcgcgcggcgccgctaatgcgaaagcgtagaaagctcttccggcgtaatgccggtgacgctggcgatgagcccgggttccagcccgttggcaagcattttgcgggcaatagcgcgcgcttcggcctcacggccttgtgctaacccttgctcaaggcctttttgcaggcccttttgcaacccttccgttcggcctttttcttccagccattccgctattgtcatcagttgttccttatactgcggcgcgccctgcgccagttgacgaattagcgccccgggttctgcggcgtttcctgctttcaacatatagttgatcagcacactgagctgcgcgtccgtcaaatgatcctgcgttaaaagcgtgataagggggtcgagcagttcgcttaaatcgcgttgacgaatatgtttttgcaggagctctaacatcgctatccgccgatgctgcaaaagctgattatccggcattgtcgtcaggtcgaccagcgcaaaatcgcggctgtataaggccttcgccatatccggtttcacaaacatattatgccagttaaggctatagggccacgggctttccggaccgtgataaaaaaggattggtaccaccagcggcaaggtatcatgaccggcatccagatgacgctgcatggcggcaatggcgtaacgcatcaggcgaaaagccatcagccggtctgatttgctctgatgttcaatgagcgcgtaaacatacccggggccgtgttgggtatgcagagagtagagaatatctgaatagcggctgcgtaaattgtcttcaacaaaactccccgactccagcttcagtgaatccagatcgcagattgcaagaaagtcttctggcatgtggatagccagaaagtcgcgggcgacctctttttgcatcagcatctgtcgaaataccgcatcgtgcggcgtggtgggtagacgttccatgccccgtcctttgttgcctgactgtagcgaccactctgtcagcgacaacgaggacaaaccagcgggcaattactctgtttgcgagtcgtcttccgtactttttaacttgttttcataatcacgcataactatttccagcgcgcgtagcaccgttcgtgccggtaagcgattctcttcaagcagcacaattaaatccacggccagtttgacttcatcaggggcattttcaagcgacatactttctccagggttagcgggttaaacgcgccagtacgttttctattttctccagcgcatgtcggcaacgcgccagccgtccttcatagatctcgacttccttttgcagcgtttgttgttcgacaaggccggtcgcctgcgccagacgaattttgcgctcctgtgtcatcgccagtagtcgacgttcaaactcctgatgctgtattcgtctgcgctgccaacggccaagccctggcgcggcggcgtcccactggcgcagcgaccaggcggcggtttcacgcgatatcgcctccagttgcgaagccagatgttccgccagccaggcgacttgcggcagttgctcatgttttaccgcctgacgcaacgcgacgagattggcgcctgcctcttccagatatccctgcaacagagtactgcgggtacggaaaaggtgtcggtcaaagcgcgcgcttaacgtcgcatgttgcgccagcggcgcgcagcgttggcgtagcgtcgccagcctctcttccagcgtctgtaacagcatagcggttttcaattcaacaccccgatgaaaataagacaggctgtgctacagtagccttctgtttgataacgattcgcattatgcaacgtactattttaatcatcattggctggctggcggtagtattagggacattgggcgtggttttgcccctgttgccgactacgccgttcattttactggcggcctggtgtttcgcccgctcgtcgcctcgtttccatgcctggttgttataccgctcatggtttggcggttatctgcgccactggcagcgctatcgggccatgccgccgggagcgaaaccgcgagcgatcgcgttgatattgctgacctttggtatttcgctgtggctggtgaatatgatgtgggtgcgggtgctgctgttggttattttggcctgtctgctgatttttatgtggcggataccggtgattgatgaaaagcaacaaaagcgctgaagcacacgaatcgctgttgcaattgtcgttcacagccagtaaattcgaccgttttcgagcacaggcgcaggcggtcaaagagtaaccgagcgttacccctgaccgaaaagtattgcgccgtgagtaacaccgtacttagcaggcatatatccatgaccgcgactgcacagcagcttgagtttctcaaaaacagcatcaaaagcattcaggattacccgaaaccgggcattcttttccgtgatgtcaccagcttactggaagacccgaaagcctacgcgctcagtattgaattgttggttgagcgttataaaaatgcgggtatcaccaaagtggtcggcaccgaagcgcgtggcttcctgtttggcgcgccggttgcgcttgggctgggcgttggttttgttccggtacgtaaaccgcgcaaattaccgcgtgaaactattgccgagacctatgaattagagtacggcaccgatcagctggaaattcatgtcgacgcgattaaacctggcgacaacgtgctggtcgtggacgatctgctggcgactggcggcaccattgaggcgaccgtgaagctgatccgtcgtctgggcgggaaagtcaccgatgcggcgttcatcatcaatttgttcgatctgggcggcgagcagcgtctggaaaagcaggggattacctgttatagcctggtgccgtttccagggcattgattcaggctattcgcactgctattttagccagagagacaacctcgctgtatcggcgaggttgtgttagcattacccttctatgaatccaccttccagcgtttcagagcctgccaatgagttatcaggtcttagccagaaaatggcgcccacaaacctttgctgacgtcgtcggccaggaacatgtgctgaccgcactggcgaacggcttgtcgttagggcgcattcatcacgcatatcttttttccggcacgcgcggcgtcggtaaaacctctatcgcccggctgctggcgaaggggctgaactgcgaaaccggtattaccgcgacgccgtgcggcgtttgcgataactgtcgggaaattgagcaggggcgttttgtcgatctcattgagattgacgccgcatcgcgtaccaaagtcgaagacacccgcgacctgctggataacgtccagtacgcgcctgcgcgcggtcgctttaaagtctatctgatcgatgaagtccacatgctgtcgcgccacagctttaatgcgctacttaaaacgcttgaagaaccgccagcgcatgtgaaatttttactggcgaccaccgatccgcagaagctgccggtgaccattttgtcgcgctgcctacagtttcatctcaaagcgctggatgttgaacagattcgccatcagcttgagcatattctcaatgaggaacatatcgctcacgaaccccgcgcgttgcagttgttatcgcgtgcggctgacggcagcctgcgcgatgcattaagtctgactgaccaggcgatcgccagcggcgacgggcaggtttcgacgcaggcggtaagcgccatgctcggtacgctggacgacgaccaggctttgtcattagttgaggcggtggttgacgctaacggcgaacgcgtcatgtcgcttatcaacgaggcggcggcgcgcggtattgaatgggaagcgctgctggtcgaaatgcttagcctgctgcaccgtattgcgatggtgcaactttcgcctgccgcgttaggcagcgatatggcggctatcgagcaacggatgcgcgaacttgcccggacggtgcctcccggcgatcttcagctctattatcagacgttgttgattggtcgcaaagaattgccctgggcgccggaccggcggatgggcgttgaaatgacgttactgcgtgcactggcgtttcacccgcgtatgcccttgccggagcctgaaacgccgcggcagtcttttgcgcccgtggccccaacggcggtaatgacgccgccgcagctgcagcagccgtcggcgcccgcgccgcagacatcgccagcgccgctgccggcgtctaccagtcaggtgctggcggcgcgcaatcagctacagcgcgcgcagggagtaaccaaaacaaaaaagagtgaaccggcagccgcatcccgcgcgcggccggtgaataactctgcgctggagcggctggcctcggtttcggagcgcgtacaggcgcgcccggcgccgtccgcgctggaaacggcgccagtaaagaaagaggcttatcgctggaaggccaccacgccggtagtacaaaccaaagaagtggtggctacgccaaaagcgcttaagaaagctctggagcatgaaaaaacgccggagctggcggctaaactggcggcggaagcgattgagcgcgatccgtgggcggcgcaggtaagccagctttctttgcctaagctggtggagcaggtggcgcttaatgcctggaaggagcagaacggcaacgcggtttgtctgcatctgcgttcgacgcagcggcacctcaattccagcggcgcgcagcaaaagctggcgcaagcgctcagcgatctgacgggaacgacggttgaactgaccatcgttgaagatgataatcccgcggtgcgtacgccgctggaatggcgtcaggccatttatgaagagaaactcgcgcaagcgcgtgagtcaattattgcggataataacattcagacgctgcgtcgattcttcgacgccgagctggatgaagagagtatccgccccatttgatcgtaagcccggcttgcgattgtgaaccatcaagagagagagcttatgtttggaaaaggcggtctgggcaatctgatgaaacaggcccagcagatgcaggaaaaaatgcagaaaatgcaggaagagattgcgcagctggaagtgaccggcgaatccggcgcgggtctggtgaaggttaccatcaacggcgcgcataactgccgccgcgtggaaattgacccaagcctgctggaagatgacaaagagatgctggaagatctggtcgctgcggccttcaacgatgcggcgcgccgcattgaagagacgcaaaaagagaagatggcttccgtctcttccggtatgcaactgccgccaggctttaagatgccattctgatgcaaaccagtccgctgttaactcagcttatggaagcgttgcgctgccttccgggcgttggccctaagtcggcgcagcggatggcgtttaccctgttgcagcgcgatcgcagcggcggaatgcgcctggcgcaggcgctgactcgggcgatgtcggaaatcggccactgcgccgactgccgcacctttaccgagcaggatgtttgtaatatctgctcgaacccgcggcgtcaggaaaacggccagatttgcgtggtggagagtcctgcggatatctacgccattgagcagaccgggcaattttccgggcggtatttcgtgctgatgggccacctgtcgccgctggacggcatcgggccggatgatatcggtcttgatcgtctggaacagcggctggcgtcagaaaaaatcagtgagctgatcctcgcgaccaacccgacggttgaaggggaggctaccgcgaactatattgccgagctgtgcgcggaggccggcgtcgaagccagtcgtatcgcccacggcgtgccggttggcggcgaactggagatggtcgacggtacgacgctgtcccactcgctggcgggacgccataagattattttctgaacaaacggaggcggcattcgcggcctccgcttgaaatcacacccgcttgtccccatctcaccctcaacgtatttttaccattaaaaatggcattgttgaggtctatccacatgaaaggacaagaaacgcgtggttttcagtcagaagttaaacagcttctgcacctgatgatccattctctttattccaataaagaaatcttcctgcgtgaactcatctctaacgcctcagatgcggcggacaagctgcgtttccgcgctctgtcaaacccggatctgtatgaaggagatggcgagctgcgtgtgcgcgtctctttcgataaagataagcgtacgttgaccattgccgataacggcgtggggatgaatcgtgatgaggtgattgaccacttaggcaccattgccaagtccggcaccaaatctttcctcgaatcaatggggtccgatcaggcgaaagatagccagctcatcggtcagtttggcgtaggcttctactccgcgtttattgtggccgataaagtgaccgtacgtactcgtgcggcaggcgacaagccggaaaatggcgtgttctgggaatcggcaggcgaaggcgaatacaccgttgccgatatcaccaaaaatgaccgtggtacggaaatcaccttacacctgcgtgaaggcgaagatgaattcctcgatgactggcgcgtacgctcgattatcagcaaatattccgatcacatcgcattgccggtagagattgaaaaacgggaagaaaaagacggcgaaaccgtgatttcctgggagaaaatcaacaaggcccaggcgttgtggacccgtaacaagtcggaaattaaagacgacgagtacaacgagttttacaagcacatcgcgcatgatttcaccgatccgctgacctggagccacaaccgcgtggaaggtaagcaggagtacaccagcctgctgtatatcccgtcgcaggcgccgtgggatctgtggaaccgcgatcacaaacatggtctgaagctgtacgtacagcgcgtgttcattatggacgatgccgagcagttcatgccgaactatctgcgtttcgtgcgcggcctgattgattctaatgacctgccgttgaacgtctcccgtgaaatcctgcaggacagcacggtaacgcgtaatctgcgtagcgctctgaccaaacgcgtcctgcaaatgctggaaaaactggcgaaagacgacgcggaaaaataccaaaccttctggaaacagttcggtctggtgctgaaagaaggcccggcggaagatcacgccaaccaggaagcgatcgctaaactgttgcgctttgcctccacccataccgactcttccgcccagaccgtgtcgctggaagattacgtctcccggatgaaagaagggcaggaaaaaatctactacatcaccgcagacagctatgcggcggcgaaaaacagcccgcacctggaactgctgcgtaagaaaggcatcgaagtgctgctgctctccgatcgcatcgacgagtggatgatgaactacctgaccgagtttgacggtaaagcattccagtcggtcgctaaagccgatgaatccatcgaaaaactggcggatgaagtcgacgaaaacgcgaaagaagcggaaaaggcgcttgagccgtttgtggagcgtgtcaaaaccctgctgggcgatcgcgtgaaagacgtgcgtctgacgcaccgtttaaccgacacgccggcgattgtcaccaccgatgcggatgaaatgagcacccagatggcgaaactgttcgccgcggctggtcagtccgtgccggaagtgaaatacatctttgagctcaacccggatcatgtgctggttaaacgcactgccgataccaaggatgaagcgcagtttaaagagtgggttgagctgctgctggatcaggcgctgttcgctgaacgcggtacgctggaagatccgaaccagtttatccgccgtatgaaccagttgctggtgtcctgataacgctcatctgactgccggatggcgacgcgaagcgtcttatccggcctacggcgagtactgtttgtaggccggataagcgccagcgccatccggcattttttataataccttctcttttctggatttctcttcgttaaccgtttcagcatcaggcggcttccttgagcgaaatgcgtgatggtggtatcgtttagcgctttttaaaaaatatcgacaacctttgaggggattttcgtaatgcgtattattctgcttggcgctccgggcgcgggtaaaggaactcaggctcagttcatcatggagaaatatggtattccgcaaatctccactggcgatatgctgcgcgccgcagtgaaatcaggctccgagttgggcaaacaggcgaaagatatcatggacgccggtaaactggtgaccgatgaactggtgattgcgctggttaaagagcgtatcgcccaggaagactgccgtaacggttttctgctggacggtttcccgcgcacgatcccgcaggctgacgcgatgaaagaagcgggtattgtcgtggattacgtgctggaattcgacgtaccggacgaactgatcgttgaccgtattgtgggtcgtcgcgtacacgccgcctctggccgcgtttaccacgttaagtttaatccgccgaaagtggaaggcaaagatgacgtcaccggcgaagatctgaccacccgtaaagacgatcaggaagagaccgttcgcaaacgtctggtggaatatcatcagatgaccgcgccgctgattggctactaccagaaagaagcggaagcgggcaacaccaaatacgctaaagttgacggtacgcaggccgttgccgacgtgcgcgcagcgctggaaaaaatcctcggttaattttttcgcgtagtgaagcacttatcaggcctgctgttatcccgcaagcctgataagcgtaacgccatcaggcaatcggtgccggatggcggcctgaacgccttatccggcctactggcatcgttagcgccattcggcaaattctcgtcttacctctcgcagcaattagttcttctttatcgcttttccgctacaattatcaacaatttgaatagataagaggcggcaatgcgtcagacgaaaaccggtatcctgctggctaaccttggcacgccagatgccccaactcctgaagcggtaaagcgttacctgaaacaatttttaagcgacagacgcgtggtggatactcctcgtctgctgtggtggccgctgctgcgtggcgttattttaccgctgcgttcgccgcgcgtcgcgaaactctatcaatctatctggatggatggcggttcgccgctcatggtatatagccgcgaacagcaacaggcgctggccgcgcggttgccagatacgcccgtcgcgctggggatgagctacggctcgccctcgctggaaagcgctgtcgatgaactgttagcaagcgacgtcgaccatatcgtcgtgctgccgttgtacccgcaatactcttgctcaacggtgggcgcagtctgggacgaactggggcggatactggcgcgtaaacgtcgtattcccggtatctcatttattcgcgattacgcggatgacggcgcttatatcgatgcgctggcgaaaagcgcgcgtgagtcgttcgccaggcacggcgagcccgatgtgcttctgctctcctatcacggcattccacaacgttatgcggatgaaggcgatgactatccgcagcgctgccgcgataccacgcgcgaactggtttccgcattgggactgccgccggaaaaggtaatgatgacgttccagtcgcgctttggccgtgaaccgtggctgacgccgtacaccgatgaaacgctaaaaatgttgggtgaaaaggggactggccatattcaggttatgtgtccgggatttgccgcggattgtctggagacgctggaagagatagcggaacagaaccgcgagattttccttgaagcgggcggtaaaaaatatgcgtacattccggcgctgaacgcgacgccggaacatattgatatgatgctgaaactcacggcgccgtaccgttaacgcggcgtcttcatcctcgccataaagaagcgtgcgccgtcctgcaaggcatcgtcggcgattgtcatcattcgcgaatagtgcagaaaggcgtgcagcgtgccgggatacattttgtattcgcagggctgctggtgcgcctgtaatgtctggtgcagcaagcggctgtcatcaatgagcggatcaaactccgcgctggcaataaagcagggcggcacatcgcgcgtgagatcgttattaaacagacaataccagggcgattcccgatcttcatcgttacgcagataggccttttcgtacatgtccagatcttcacgcgtcaggccgtcccacgcgccgccgaacagacggcggcttaccgaatcttgcaacccatacagcccataccacaacagaatcgcgataacgttaccgcagcgaatgtgcttatcacgtagccagagcgcgctggcaagcgccagcatggcgcctgcggaatctccggcgaaaccgattttctccacgttgagcgagtattcatcggcatgttgagagaagtagctgcataccgcgacggtttcttcaatggcctgtggataacgcgcttgcggcgacagcgaataatcaatgccgatcacggtgcagccggtataacgcgccagcagacgcattatccggtcatgcgtatccaggttaccgaggataaatccgccgccgtgcagatagtataaggtggcctggctggtcggctgcggcgagtagagccgggttgttacatcgccataaggcgtagggacggcgcaggtgcgggtggtcatggacggcgcgtcggcattccagaaacggcgctcaagaagataatactgacgctgggtctcaatatcgccatcggcaggccaggggggaaggcctggttgctggaagtttacgacggctgtcatttcgtctgacagtcgggtgagtacgggaattttattttccggcttcataaaacgctccttgtgaaagtgaaccattgtaaaaaacgcggctggagaaactgcgatctcgtcgtccgatattgaaacgccatcgtccgtcgcgcgcagcagggggaatgtgctaccatgcagcgctccgttattcatccgtaagcacaatcatgaaatttcccggtaaacgtaaatccaaacactattttcccgtcaatgcgcgtgacccgttgttgcaacaaattcagtcagaacaggaaaccaacgcctcctgggtcgtcggtatcgaccagacgttggtggatattgaggcgaaagtggatgacgattttattacacgctatggattaagcgccgggcattctctggtgatagaagacgaggtggcggagaagctgtatcaggaactgacgcgggaaaatctgatcacccatcagtttgctggcggcaccataggcaatacgatgcacaattactcggtactggcggatgaccgttcggtgttactgggcgtgatgtgcagcaacattgagattggcagctacgcttatcgctacctgtgtaatacttccagccgtaccgacctgaattatctgcaagcggtagatggcccgattggccgctgtttcacgctgattggcgaatccggcgagcgtaccttcgctatcagccccggccatatgaatcagttacgggcggaaagtattccggaagcggtgatcgctggcgcttccgcgctggtgttgacctcatatctggtgcgctgtaagcctggcgaaccgatgcctgacgcgacgatgaaagcgatcgaatacgcgaaaaagcataacgtgccggttgtcatgacgctgggcaccaaatttgtgatcgccgataatccgcagtggtggcaggcgtttctcaaagagaatgtctcgattctggcaatgaatgaagaagaagcggaagcgctgaccggcgaaaacgacccgctgctggcggcggataaggcgctggactgggtcgacctggtgttatgcaccgccgggccgatagggttatatatggcgggcttcaccgaagaggaagcaaaacgtaaaacccagcatccgctgctaccgggagctattgctgaatttaaccagtatgaatttagccgggcaatgcgccataaagattgtattaatccgctgcgcgtttattcgcatattgcgccgtatatgggcgggccggaaaaaatcatgaacaccaacggcgcgggcgatggcgcgctggcggcgctgctgcacgatattacggcgaacagttaccatcgtagcaacgtaccgaactccagtaagcacaaatttacctggctgacctattcgtcgctggcgcaggtgtgtaaatatgctaaccgtgtcagttatcaggtactgaaccagcattctccgcgtctgacacgcgggctgccggaacgtgaggacagcctggaagagtcgtactgggatcgctaatctggcttgcccgatggcgctgcgcgcatcgggccgtccggcaaacccttaactggcgacgacttcacccgcgggcggcgtttcaagcagttccagcatcgcccgggcaatttctcgctcgcccatcactacctgattggctccccgctcggtaatatatttcacttcatcatcatagtgcgcgcgggcgattatctcgatatcaggactttttccccgcgctgaggcgacaatctcaccggcttcgtaaccgttggggatggtcaataacagccagcgagcgcagtccagatgcgccagattcatgatttcttcgttagcggcgttgcccagtacggcgcgaatcccgcgttcgcgcagttcatccacgcgggtacgggacgtttcgataaccaccagcggaatccccgccgccagtaatttttctcccagcagactgcctacgcggccaaaacccaccagcagggcatgattacagatatccaccggaatttgcttctcttcttcgatagcctcttccagagtttgctcttccagcgtttcggttttcgccagatacttctccagcagggtaaacagtacgggattaagcataatcgacaaaatagcgcctgccagcaccaggttctgtcccgcttgcggcagcaggttgagcgccatgccgagcccggcgagaataaaggcgaactcgccgatttgcgccaggctggcggcaatggtcagcgcggttcgcggcgagtggccgaacaaacgcaccaggaaaaacgcagcgatcgatttgccaaagacgataatggcaagcgtcgccaacaccgccagcggctgttgaatcaagactaacggatcgaacaacatgccgacggaaacaaaaaacaggacggcaaaggcgtcgcgcagcggcaacgtatcgtgcgccgcccggtgactcagttccgactcattaagcaccattccagcgaagaacgcgcccagcgcaaaagagacgtcaaacagttctaccgcgccaaacgcaatgcctaacgccagcgccagtacggaaagggtaaataattcgcgcgagccggtggcggcgctgcgggccataatccacggcaccaggcggcgtccgaccagcatcatgatggcgataaacgccaccactttaccaatggttatccccatatcgactgtcagcgaggctatgccgacatcgcctttttccaccatgccggcaacggcgggcagcaagaccagcgtcagcaccatcaccagatcttcgacaatcagccagccgatggcgatttgcccgcgctggctatcaaggagttgtcgctcctcaagcgcgcgcagcaggacgacggtactggctgtagacagacagagcccaaaaacgatgccggtcattaatgaccatcccagcacggcggaaagcgccatacccagcagcgtcgccaccgctatctgagcgacagcgccgggaatggcgatagactttaccgccatcaaatccttcagcgaaaaatgcagcccgacgccgaacatcaatagaatcacgccgagctccgccagctccggcgccagtttggtatccgcaacaaaacccggggtaaaaggtcccgccagaacgcccgctaacagatatcccaccagtggagaaatacgcaatttgttggcaatcatgccgagaataaaagcgagcacaaggccgccgacaatggtggtgataagcggggtagcgtgatgcattccgtctcctttggttgctggactccaaaactccgggtaatagtttatgacaatttcaatcaggatgtttataaaaaatggttgtgttttataaaaagatacgatctgaaggcaaaaagagcacggaacgtaaaagtgataagtatgggatggacaaagcaagatggcatcaggatgtacaggcggttaaagcgtacctttaaccgccataaaatcatgctttatgtcgattatcaggtaagaatatggtcagtatccccagaagcggcaggaaagcacagattttataaactaaatagatactggtatggtcggcaatcagccccagcaccgctgcgcccaggcctcccatcccgaaggcaaacccgaaaaacaggccggaaaccataccgatgcgtcctggcagcagctcctgggcatacaccagaatggcggaaaacgccgacgcgagaataaagccgataatcaccgttaaaatccccgtccagtacagcgtggcgtagggtaaaacaagggtaaacggcgcgacgccgagaatagagccccaaatcacatatttcctgccgattttatcgcccaccggcccgccgattaccgtcccggcagccaccgcaaacaggaaggcaaacagatggagctgcgcgttttgtattgataatccgaatttttgcatcagataaaaggtgtagtagctactgatgctcgccatataaaaatatttcgagaaaatgagtagcaataacacgctgaccgccagcacgactttattgcgcggcagcgggttagcgattatcgcttttggcttgcctttcgctatccggtgctgggctgcataccagcggctgatctgcgccagcaccacgatcgccagcagcgcggccagcacaaaccaggcgacattccctttgccatagggcgcgataatcacggcggccagcagcgggcccaatgaactgccgaagttaccgccgacctggaagatagactgcgccagaccatgacgtccgccggaggccatgcgcgccacgcgggacgattccgggtgaaaaacggacgagccggtacccaccagcgccgcagcgagcaatacgccgccaaaacttcccgccattgccagcagtaccagcccgctcagggtaaaacacatgccgacaggcagcgaccacggcatgggatacttatccgtccagtagccgacgaccggttgcagcagcgatgaggcgagctggaacgtcagggtgatcaaacctatctggacgaaggtcagcgagaactccgcctgcaacaggggataaatggctaagattagcgactggatcatatcgttcagcagatgggaaagactgatcgcgcccaaaataccaaacgaagtacgtgctttagcggccgctgcgggcgcgccggctaacggctgggttggttcactcatggccatagaaagtcacttaaattttatgcgatgttggagatagtaggatgtgtaattattacttgcctaacatacctgtgaaatgtgtttgaaggaagtctcaattctgaaaacatatttgtctattattgcaaggaaaggtaatttctgcggttgatattgagtcagggagagaaagatgaaatttttgaaacggggtgtggcgctggcgttactggcggcgttcgcgctgacgactcagcctgcacaggcttacgaaaaagataaaacctataaaattactatcctgcataccaacgatcaccacggtcacttctggcgcagcgaatatggcgaatatggtctggcggcgcaaaaaacgctggtggacagtatccgtaaagaggtggcgcaagaggggggaagcgtcctgttgttatccggcggcgacattaataccggggtgccggaatccgatctccaggatgcggagcccgatttccgcgggatgaatctgattggctacgacgctatggccgtcggtaatcatgaatttgataatccgctcaccgtattgcgccagcaggaaaagtgggcgaagtttccctttctttccgccaatatttatcaaaaaagtaccggcgagcgtctgtttaagccgtgggctatttttacacgccaggatataaaaatcgcggtaatcggcttaaccaccgatgacacggcgaaaataggcaacccggaatatttcaccgatattgagtttcgtaaacctgctgaagaagcaaaggtggtgattcaggaacttaatatgaatgaaaaaccggacgtgattatcgcgaccacgcatatgggacattatgacaacggcgatcacggttcgaacgcgccgggcgacgttgagatggcgcgtagcctgcctgccggttcgttggcgatgattgtgggcggtcactcacaagacccggtatgcatggcgtcggaaaataaaaaacaggtgaattacgtaccgggaacgccctgcgcgccggataagcaaaatggcatctggatcgtgcaggcgcatgagtggggtaaatatgtgggccgtgcggatttcgaattccgtaacggcgagatgaaaatggttaactaccagcttattccggtaaatctcaagaaaaaagtgacctgggataacgggaaaagcgagcgtgtactttacacgccggaaatcgcagaaaatccgcaaatgctctcgttattaacgccgttccagaataaaggtaaagcgcaactggaggtgaaaattggtagcgtgaatggccttcttgaaggcgatcgcagtaaggtcagatttgtccagaccaatatgggacgggggattctggctgcgcagatcgcgcgcaccggcgccgattttggcgtgatgagcggcggcggtattcgcgactcgattgaggcgggagatattacctataaaagcgtgctcaaggtacagccgttcggcaacattgtggtgtatgccgatatgagcggcaaagaggtggttgattatctcaccgccgtagcacagatgaaaccggactccggcgcctatccacagctcgccaatgtgagctttgtcgccaaagagggcaagctcaccgatctgaaaatcaaaggcgagcctgttgatccggctaaaacctatcgcatggcgacgctgagtttcaacgccacgggcggcgatggttatccgcgcattgataacaaaccgggctacgtgaataccgggtttattgacgcggaagtgctgaaagagtttattcagcaaaattcaccgctggatgcggcggcgtttacgccaaatggtgaggtgagctggctgtagcggtacggatagccatttctgcctgatggcgcgcaaccttaaggcctacggattatgtctgctgtaggccggataaggcgtttgcgccgctatccggcaatgtattttacgcaggcttaatcccgacgcgcgatatcagcgaatttagcacccaggatggcggccaaatcgtcagccgccagttcaatatccagcccgcgtttaccaccggaaacataaatagtggcaaacgtgcgggctggcgcgtcaatcagcgtgggcagccgtttcttctgtcccagcggactgatcccgccgaccagatatcccgtggtgcgttgcgccaccatcgggtcggccatatcgacctttttcgcgcccagagctttggcgacttttttcaaatccagctgtccggctacaggcgtcacggcgacggccagttgcttcatatcgccattcacggcgaccaaaagcgttttatacacctgatcggcgtttagcccgagcttacgcaccacttcatcgccaaagttagtttcattcggatcgtgatcgtaggtgtgaatgttaaacggaatcttgtttttttcgagtaacttaactgcgggtgtcataacgttccttcttactacagacgtgatttgccatcagcatacgcccgaaagcggactaaaaaatagtataatcttgtgcattaggtcttggcagttgcggcaactttgagcgacaatctgaagatccgaagcgaaagcgtcgggataataataacgatgaaattcctctttgacgggccaatagcgatattggccatttttttatttcaatatttgcggtaggttgccttcgccgtacagatgtagcgcccctacggctaccacgtagcgtcccggcggcagtgccagcagcgcgtcgcgccaggcttcattgcgtttcaccatcagtacatcatacagcggctggctaaacgttctggggagcgaagcgccgacgctggtcggcggctgctcaagccaccagccgatcatcacctgcaaaagccgtgcgttggtgtgccagtgcgtcagcgtgtcgtcgagcagcgccatcccgccatcgggcagatcgcagagtagttcgagctggtgtttcgccccttccagctcttgcaccggcagcgacatttcgcgggcagcctgtaatagctgataatcaatgccatagtccgggcgcaatcccagccgttgcgcctgcgtggcctgtagcaccatagctatctgccataaaggttgattatcaaaatggatcagcggcatacccaactcactgacccgtttttccagtgcgcttagctgcccggcgctgagacgttcgaccaacggcgggcatttggggagattgctgaatggcgtttcgttaccagaaatatccgcttcaacgaccagcgcgtcggcctggtgtagctttttcaccagctttgctggaagaggagccatatcgcgcgtccccatatgaatactgccaaccagatgcagatgacgaccgccgggcagggagagatcgatagcaggccaactatttggggtaccacgcagcgcgcgccataaacgtttaagttgatttaatagctccatacgcgctccctttgaaaaagctcatgctagcgcgttggagaaaagggcgcaatgcgccctgacgggacgtcaacgatcggtcgggttattcgctgccgtcgagataggccgttctggcgatggtcatttcaagctggcatttataaatactgatgcgcttttcagcgggtatggcctcggatttggcatcgctaagtttgccgcactgctgctctttttgggtcacccagactcgctgctcttgttttaatgccgttcgggcagaggcgggtagtgaattccagacctgattaagctcgcgatctctactttcaaatttctttgctgcgatttcaatcagtgagttattttttttctttataatgctatcaccagataccgtcattcttgccattacataaatagatcgcgccaatttatcggttttttgcacagaggtgacaacaatatctttgttgttgtctgctagctgaatattgtagttaacctgtttccaggtcaccgtattgtttattacctgtccatccccttgtgaaatatagaatagagtatttggtaagtctttcattaatttaaataatggctgaggaatacccatggcgacggtagccgagcaagttcgtaggttggcattttctgcttgagggttctgcgtgattacatcactgaattgaacaggaatagcccggagttgttgctcgtattgagtctgggggatatcgaagaaaagcgtggagggctctttaatatagtcttgctgtaaacgacctaatgcttcattgtaaatccattcttttgccgccgtgactgcattatcgttgccacattttaactctggagtggaatcaaataaccctgcataactgacggcgggagaaagcaggaaaagaagcgtaactgcttttctaaacataaataacacatccttatgattcaaaaaaacattataaaatgttgttttttatttttctacaggatgtgcggttaaatttttatatattgatacggtaaattactgatggcttaataatatatcaggcagctgatgctgcctgatatagcgtttttacgctttcggtttaaaacgcaatagccggttggcattgctgacgacggtaatggaagacagcgccattgccgcgcctgctactaccgggtttaacaaggtaccggtaaacggccacagaataccggcggccaccgggataccaatgctgttgtagataaatgcgccaagcaggttttgtttcatattgcgcaacgtcgcgcgcgaaatggccagcgcatccgccacgcccatcagactatggcgcatcagcgtaatcgccgcggtttcaatcgccacatcgctgccgccgcccatcgcgataccgacgtccgcctgcgccagcgcgggcgcatcgttgataccatcgccgaccatcgcaacctgacgaccctggctttgcaggcgtttaatcgcatcggctttgccatccggcagaacgcccgcaatgacttcgtcaatacccgcttctttggcaatcgcgttagccgtcgttgggttatccccggtgagcattaccagacggtatccggcgttgtgcaggcgttcaagcgcggcaatactatcgctgcgcaatggatcgcgtaccgccagtaacgccgccgctttaccgtcaatcgccagcaggaccggagtcgagccttgcgaggcctgcgcggtgatttccgccgtcatgtcatccgtggcgacgtgctgttcgttcagcaacgcctggttccccagaagcagttgatgaccttccgcttcaccgctgacgcccagtccgcgcagcgttctgaaaccgttcacctgcggcagtttatcatcgccggctttttccagaatcgcatgggccagcgggtggctggagccttgttcgagcgcggcagccagacgtaatgcctgagcttcctcaacgccgttaaaggtttttatcgccaccacttgcggcttgccttccgtcagcgtcccggttttatcaaaaacgagggtatccaacgtactggcgcgttgcagggcatcggcgtcgcgtaccagcacgccgaattcggcagcgcggcctacgccggaaataatcgacattggcgtcgccaggcctaatgcgcaagggcaggcgataatcagtacggtggtggcgatgaccagcgtataaacaatttgcggcgccggcccgaagaaataccagatagcggcgctgaacagcgcaatggccacgacgacgggaacgaataccgcggagattttatcggccagttggccaatttccggtttactgctttgcgcctggcgtaccatgcgaataatgcgtgacagcgtggtatggctgcccaccgcgctggcgcggaacaggacgctgccgtcctggacgacggtgccggcatgaacgctgtcgccttcgcctttttgctgcggaataggttcgccggtcagcatggcttcatcaagccacgcttcgccttgggtaatttcgccatccaccggcacgcgatcgccggtagtgagccgcagcagcatccctggctgaacgtccgccagcgggacgcttttttcgccgtcttctgtcacgacgcgtgcggtgggcggggtgagatcgagtaatttttccagcgcttttgaggaacgctgacgggcgcgcgcttccagcatgtgtccgagattaatcaaaccgataatcatcgcgctggcttcgtaatagaggtgccgcgcttccatcgggaaccactgcggccacaggttgacgctcatggagtagagccaggcaaccccggtgccgagcgccaccagcgtatccatcgtcgccgtgccgttcagcaggcttttccacgcgttacggtaaaagtgaccgcccgcaaagaccatcaccgcaagcgtgatcaggccaatagccagccacaggctgcggttgtcgtcggtcaccatcatgttatcgccgatcatcccccagaccatgaccggtataccgaccgcaagggcgacgattgcctgccaacgaaaacgtttcatggtggcgatggcggtttcctgctggcgctcgcggcgtttgatgtcatcttcaatcgcttctgcgccgtagccggctttttccaccgcctgcactaaatcagcggcggacgcgctgcccatcaccagcgcagtgcgttccgccaggtttacccgtgcctgcgtgacgcccggtacgctttgtagcgcatgttgtacgcgggtgacacaactggcgcagctcatgccgcttaacagcaactgttggctttcttcatcggccgtcgctaccggaagctcatgaggaaccgctgccagtgcttccgacgggattgatgactccgtcagcggtttagcctttgggtggcttaacgtcgcgccatacccggcttgtttgatggtttcaattaacgcgtccgcactggcggtaccggtaacgtgcgcttcggttacggtgacgtccgccagctcaacatccggacgttgttcaagactttctttcacgcgtttaacgcaatgaccgcaggacaaaccgtccagggtcaggtcgatagtttgagacatagtaaaaactcctttatgattggtcatcaattcattgaccttagtaatcgtagtgactcactgtgataaaggttaaaccttccagcaaggttaaggtcaagggggaaatatgaatattagcgatgtggcgaaaaaaaccggtttaaccagcaaagccattcggttttatgaagagaaagggctggtgacgccgccattacgtagcgaaaatggttatcgcacctacacgcagaagcatttaaacgagctgacgttgctgcgacaggcgaggcaggtggggtttaatctggaagagtgtggcgaactggtcaatctgtttaacgatccgcgacgccatagcgcagatgtgaaaaagcggacgctggaaaaggtcgcggagatcgagcgccatatcagcgagctgcaatcaatgcgcgatcaactgttggcgctggcggagagttgtcccggcgatgacagcgccgactgcccgattattgataatctttccggctgctgtcatcacaaggcgcaaaagccacgttgattaaacggcacgaatgcgtaaggtgatgccttccacggcgatcacttcgacatgcgtacctgcgcgcaggtcttcgtcagcgcataccggccacgagctgtcgccgacacgcatatgaccccgtccgttcactaacgcggcatcaagcataaaccggcggcctaccagttgttgtccgcgttggttaaggcggctgtcggtcggcttctgttcccgcacgcgacgcgccagccagcgccaccaaagccaggccgccagcaacgttaaggccgcaaacagcacgccctgccattcccagccgagcggtaagagccagacggttaagccggtaatcactgccgccacgccgctccacagcaaatagccgttaccgccgagcatttccgcagccaacaacaggccgccgaggctaagccagaagatatgcggatgcaccagaatcatcgctatcatgcttttttccgttcgctggcgctgtccttaaccagctcgctgatcccggcgatagcgcccatcagactgctggcatccagcggcatcatgaccactttgctgttattcgccgagccgatttgctgtaacgcttcggtgtatttctgcgccacgaagtagtttatcgcctgaatatccccggcggcgatggcttcagacaccatctgcgtagcgcgggcttccgcttcggcggaacgttcgcgcgcttccgcctgcaggaaagcggactgacgttcgccttcggctttcagaatctgcgactgtttttccccctcggctttcaggatttccgcctgacgtaccccttcggcctcaaggatataggcgcgtttggtacgttccgctttcatctgggcgttcatcgaggagatcaattccgcgggcgggcggacatcgcgaatttcgatacgggtaactttaattccccacgggttggtggcttcatcgacaatatgcagcagccgcgtgttgatgctgtcgcgctgggagagcatttcatccagctccatcgaaccgagtaccgtacggatattggtcatggtcaggttaatgatcgccagttccaggttactgacttcataagcggcgcgcggcgcatcgataacctgaataaaacagaccgcatcgatagtgacgttggcgttatcttttgagatcacctcctgcgacggaatatccagcacctgctccatcatattgatcttgcggccaattctgtccataaacggtacaacaaggcttaatcccggctgcagggttttggtgtaacgtccaaagcgctccaccgtccactggtatccctgcggaacgattttgacgcccgcgccgacgatcaccagcgcgacgaaaatgagaatagggataagaatgagcatagctaaacctcctgttgcgttgtccataaaccgattttgctgacgaattaagcgaattatacctgattcagtaaagcatgttccccccttattaattacagggatacactatcgctataaaaatatgaacaacggatgcgcaataaatgacagaacgtagcatgttgcttgagttaaagcaggtcggttaccggactgcgacgacaaaaatagtgaataacatcagttttacgctgcaacgcggcgaatttaagttaattaccggtccttctggctgcggaaaaagtacgttgttgaaaatggtggcctcgttaataagccctgatatcggcgtgattctttttgaggggcaggatattactactctgagtccggaagcctatcgccagcaggtttcttattgcgctcagacgccagcgctatttggcgatacggtttacgataacctgatttttccctggcaaattcgccatcagcgcccgcagccgacagccttcgcagacgatctggcgcgttttgaactgccggagacgattctgcaaaaaccgattaccgcgctttccggcggagaaaaacagcgtattgctctaattcgtaatctacagtttctgccgaaaatactgttactcgacgaaataaccagcgcgctggatgaacataacaaacggaatgtgaatgatattattcatcgctatgttcgcgataagcaggtcgctgtcttgtgggtaacgcatgataaagatgaaattcaacacgcggataaggtgataacgttaacgccatctgccggagagatgcaggaggcgcgttatgaacgagcataatattaccaatacctcgctggcgttatcgatgctgctggtggtggtcgcgatgctcatcagtcacaaggaaaagctggcgctggaaaaagatattctgtggagcgtatgccgggcggtgatacagctcattattgtcggctatgtactgaaatacatctttggcgttaatcatgccgccctgacgctactgatggtgctgttcatctgttttaacgccgcatggaacgcgcaaaagcgcagtaaatatatcgataaggcatttctctcctcgtttatcgccatcaccgtcggcgccgggctaacgctgacggtactggtgcttaccggttcgattgaatttgcgccgatgcaggtgattcccatcgctggcatggtcgccggtaatgcgatggtagcggtagggctgtgctacaaccaactggggctgcgttttcatagcgagcagcagcaaatccaggaaaagttaagtttgggcgcaacgccgaaaatggcctccgccgggcttatccgcgatagcatccgcgcatcgcttatcccgacgatcgactcggcaaagaccgttgggctggtgagcctgccggggatgatgtccgggctgatttttgccgggatcgatccggtaaaagcgattaaatatcaaattatggtaacgtttatgctgttgtcgacagccagcctgtctaccatcattgcctgctatttaacctaccggaagttctataattcgcgtcatcagttggtagtgatgccgctcaagaaatcatgatagttgccggatgatggcgcaagcgccttatccggcctgaggacgacaggtaggccagataagcgcgccatcaggcaagagaggattaatacagtagcgcgtacaactggcggcggtatttcgacgccagcgcgtcgccggtgccgagcgcggcaaggatctcctggaaggttttgcgcgtctgtccctcggcggcggtaagatcttttctcagatggctgaacagcaattccagcgcttcttcattacgtccgacctggtgcaactgcaatgccagttgcgttgccaaagccgcatcctgcggattgtccgcgacttgctgctgaagttgctgaatttccggcgtatccgccgcctgtttaagcagttcgatctgcgcaaccagcccctgataacgggtatcctgatcctgtagcgggatagtttttaacaccgcttcggcctcttcagagcggttcagcgcaatttgcgcttccgccagtaacaggccaatctcactgttctgcgaagagagctgccaggcgtctttgagcaacggcagcgcgtcaatgtagttgccctcctgcattaactgcatcgcttgttgcgcctttagctcttcttcgcgcggcagtactttatccagcagagcgcggatcgcctcttccggctgcggtccctggaaaccatcgaccggttggccattctggaacagatagactgtcgggatggcgcgcagcccaaactgagcggcgatcatctgttcggcgtcgcagtccagctttgccagaataaactgaccgtggtactgggcagccaggctttccagcactggcgttaattgcagacagtgttggctgcgttcagaccagaaatagaacagtaccggcgtggtcatggactgctctaaggtctgctgcaggttggattcattaatattgacaatgttctgtacggacatggcgtcgctctcttttgtctgtgtcacgtttacatgggggctgacgggcgcgcttcaactcagctttgtaaaattttatccagcatccggcccggcaatatgcgtttcagcgccatcaccgcccaggtgaccagcgtaacgggatagcgcagcctgggtttatcgcttgcaaaagcatgacgtactttcgctactaccgcgtcaggatcgcgggtgaaacgtgcggcgatgccgggattttctaccggtttatcacgctgcgtctggttaacgttatcggtaaaacgggtacgaatcggccccggttctatcaggctcactttaatgcctgtgtgccgtagctccatacgtagcgcgtcagaccaggcttcgagcgcatatttgctggcggcgtaagcgccgcgccctggggtggaaatcagccccatcaccgatgaggtcatcacaatgcgtccttcgccatgcggcaacatggcgggaagtaagcgcatagtaagctgatgcgcgccgaagaaattactggaaaactgttgctccatctgctcacggctgatggtggaaagggggccatacacgccgtagccggcattgttaaagatcccatacagacgattatcggtcagggcgatcacttcatcggcggcacgatccacgctttcaggggagtcgagatcgatcaacacgccggtaaatcccatactgttcatccgggcgacatcatcaggtttgcggcagcccgccaggatttgaaagccctggcgtttaagctcaagcgcgctgtccagaccgattccgctggaacatcctgttattaagaccgatttttgcataactttacctgtcaggatctccgttgatttaagagtcgtggttaactatatccgtcatacttcaagttgcctgtgcgttcgtttactccagtcacataggtatctatgctcctggacattctcttacgtgccgccttcatgcaactcgaatgattcaggagagaaaaggggtcaactgcttcgccatccagtcggcaataaacggctgggcgtcgcggttgggatgaatgccgtcatcctgcatccactgcggtttcagatatacctcttccataaaaaacggtaacagaggaatatcgaactctttggcgagcttaggataaatggcgctaaaggattcattataacggcgaccgtagttagcgggcagatgaatttgcatcagtaacggttgggcatcggcggctttcaccgtctgaatgattttacgtagcgtctgttcggtttgcgcaggcgcaaaaccgcgtaggccatcgttgccgccaagttccaccactacccagcgcgggtgatgctgttgcaacagcgccggcaaacgcgccagtccctgctgcgaggtatctccgcttatactggcattaacgaccgacgttttgttttgccatttatcattaaggagcgacggccatgccgcgctggcggccatacggtaaccggcgctgaggctatcgcccagaattaataaggtgtctgcggcggcggcacggaaagttaacaggatcaaaaacaggaagggcaaatgccagcggaaaacagtgttgaagttcatcgtctcaggaagtccgtcggtcagggtgagcatgagctttccatccttaccggagttgaactggttgtcaaacgcggcgaaaccattgcgctgattggcgaatcaggatcgggaaaatctacgctgctggcgattctcgccggactggatgacggcagtagcggagaggtcagtctggtcgggaaaccgcttcaccagatggacgaagaggcgcgggcgcagcttcgcgctcagcatgtcggttttgtttttcaatccttcatgcttattcctacgcttaacgcgctggaaaacgttgagctaccggccctgctacgcggtgaaaacagcggtcagagtaaggcgggggcgaaagcgctgctcgaacaactgggactgggaaaacggcttgaccaccttccggcacagctttccggcggcgaacagcagcgcgtagcgctggcgcgcgcgtttaacgggcgtcctgatgtgctgtttgccgatgagccgacgggcaaccttgaccgtcagaccggagataaaatcgccgacctgctattttcgcttaaccgcgagcacggcaccacgctgattctggtgacgcacgacccggcgctggcggcgcgctgcgaccggcggctgcggttggtcaacggtcagttacaggaggaggcatgatagctcgctggttctggcgcgaatggcgctcgccgtcgctgattattgtctggctggcgttgagtctggcggtggcctgcgtactggcgctcggcagtatcagcgaccggatggaaaaagggttaagtcagcaaagccgcgagtttatggcaggcgatcggacgctgcaaagttcgcgggaggtaccgaaagcctggcttgaagaggcgcgtaaacgcggccttaacgtgggcgagcagttaacctttgcgaccatgacgtttgccggcgatacgccgcaactggccagcgtgaaggcggtagatagcgtttatccgatgtacggcgaattgcaaacccgtccaggcggagtgaaagcgcagccgggtagcgtactgctggcgccgcgtctgatggcgctgcttaatttgaaaacgggcgataccattgatgtcggcgacgtgaccttgcgtattgccggtgaagtggtgcaggagccggattccggatttaacccttttcagatggcgccgcgtctgatgatgaatatggccgatgtggcaaaaaccggtgcgatacagccggggagccgcgtgatgtggcggtataaattcggcggaacgccgcaacagcttgctggctatgaaagctggctgttaccgcagcttaaaccggaacatcgctggtacggactggagcaggatgacggggcattggggaaatcgctcgaacgttcgcagcagtttttgctgctttcggcgttattaacgctactgctggcggtagctgccgtcgcggtggcgatgagccattactgccgtagccgctacgatctggtggcgattttaaaaacgttgggcgcgggccgggcccagttgcgtaaacttattatcggacagtggttgatggtgctggggctttccgccgtcacgggaggcgcgattgggttactgtttgaaaacatattgctggtgctgctaaaaccggtactgcccgccgatttgccgcccgccagcctgtggccctggctgtgggcgctgggcgcgatgacggtcatctctctgctggtcggtttacggccttatcgattgttgctggcgacccagccgctacgggtgctgcgccgcgatgttgttgctcgcgtctggccgttaaaaatttatttgcctgtcgcctgcgccgtcgtggtggcgttgctcgtcggattgatgggcggaagtatgctgttgtgggcggttctggcgggcgccgtgatactggcgctgctgtgcggtctggtgggctggatgctgcttaacgtgctgcgcggcatgacgttgacgtcgctaccgctgcgtctggccgtcagccgacttctgcgtcagccgtggtcaacgttgagtcagctttcggcgttttcgctttcgtttatgctgctggcgctcttgctggtgctgcgcggcgacctccttgatcgctggcaacagcagctcccgccggaaagtccgaactatttccttatcaatattgcttcagaacaggtcgcgccgctgaaagcctttttggcggaacatcaggtgatcccgcagacgttttatccgattgtgcgggcgcggttaacgaagataaacggtaatccgacggaaggtcagcaggatgagtcgctcaaccgtgaactgaatttgacctggcaggatacgcgcccggcgcataatccgctggtcgccggtcactggccgccaaaaccgggcgaagtctccatggaagaggggctggcgaagcggctgaacgtcaaactcggcgatagcgtaacctttatgggcgatacccaggcatttagcgctaaagtcaccagcctgcgtcaagtggactgggaaagcctgcggcccaactttttcttcatttttccttccggggcgctggacgggcaaccgcaaagctggttgaccagttttcgctgggagaatggcaacggcatgttaacgcagcttaaccgcgagtttcctaccgtcagcctgttagatatcggggcgatcctgaaacaggtgggacaggtgctggagcaggtcagtcgggcgctggaggtgatggttgtgctagtcaccctctgcggcatgttgctattactggcccaggtacaggtcgggatgcgtcagcgccatcaggagctggtggtgtggcgcacattaggagccggaaagaaactgttgcgtaccacactctggtgcgaattcgccatgctggggttagttgccgggctggtcgccgcgattggcgcggagacggcgctggcgatcttacaaatcaacgtttttgatttcccctgggagccggactggcgtttatggggcgcactgccgttttgcggcgcgctgctgctttccgtatgcggcggctggcttggcgttcgtttgctgaaaggcaaagcgctattccgacagtttagcggatgattcatgatgtgaataatttcgcgccggtttttaaaacggcgcgtacttttttagtcgcacaaattgataactccttgatttttagtagcacaaatcattaaaaaatacacaacacgtaaggttttataacagttattatttgcctgctaaatgatttggattggctatctatcaaggaaaatataatgacaattaaaataacagcgttggcggcatcgatcggcgcggcagtggctttcatgcctttcgccactcaggcggaaatcaccgttttaaaacaagatccccaggcgggtaatccactcagccgactcaatttcaccgttggcgggagtattcgtccgcagttccagaatatgaccggcaatgacggcgcgaacggttataaacgtaatggttttgatggcgggacgcgtttccgcttcgccgcggattattatctgtttgatgatatcagttggattagctattacgagctgggcgtcaatatccctgcggtatttgactgggataaccattatgcgaagggcgcgactgataccactcgccgtatgctgtataccggcttcaagagcgcgacgtggggaacgctgaccttcggtcaacagaacagcatttattacgatgtggtgggcgtaaaaaccgatatctgggattacgacatgataggtcaggcgccgggcaacgggattaacggcgactacgatggttcttatcgcacgcgtaagtcattgaagtataagaaaagcattggcaatgtcgatctctacgcgtcttatctgttcagcgacgattataatgccaataacggcctgaattacaagcgtaaaggcggcggttctttaggcgcggattaccatctcaccgacgatctgacctgggggacggcatggaactatacccgtgcggagatgcgcggcaacggcaataaaacttacgatcaaaatattgtcggtaccgcgttaagctggacgccggaaaactggactatcgccgcaggcggcggttggtatcagaactttatgacgaccaaaaaagtgtctgtgaatgattactttgccggcgatgcgtggggtctggaatattttgtcggttacgctttcccgattggtcagtatgccgtgaaagctattcaaccgtactttatgggcgaccgcattgaatatgtgaatggccgcgactatctgcgcaccgataacggcgtggggatcaccttccaactggattatggtttccgcgttgattatgaacatgttttcacttccagcactgacaatctgggcgatatgaacctggtgcgtctgcgttacgatttctaaagcgttttcctctgccggatgttggcgttaagacctcttatccggcatttccctttacgccattcccgcctgacacacgcctgagcgcctgcctcgtacatttaacgacacaccaggaaacatcatgaaataatttcaaggacagcaggctgtgatctgtgtcatgttaagaaatagcctttcgtttgggccaaaacagacgatgccgcatgaacggcatccggcacagcatcacactatttaaaatggagaaattatgggattgcgtcagagtttacgcattgcggccagcacgctattactggcctgcggattacagtttgcccatgccgatagttccccgcaaacgatcgtatttggcgtcgcgccagggccgtatggcgacatggtgaagcaggcgattgcgccgacattaaaagaaaaagggtataaggtcgtggtgcgcgagtttagcgactatgtccagcccaatatggcgttagctaatggcagcatcgacgccaacctctttcaacataccctctattttgacaaattcaccgctgacaaagggctgaagctcagcaaacttattgtggtaccgaccgccgggatgggcttctattcacgtaaaatcaacagcctggatgcgcttaaaaaaggggacattattaccctctccaacgatccgaccaacctggcgcgcggccttcgcttcctgcaatcgttggggcttatcacgattaaggacaatatcgatccgaccaaagcctctgaacgagatatcgccagcaatccaaaaggactggttttcaaaccgctggaagccgcacagctaccgcgcacgctggatggcgtgaccggcgcgctggttaacgggaactttgcggtggcggcaggactcgatctctccagcgcgattaagcaggaacacctggatgagaatctgaaaaatatcattgcggtacgcagtgaagatgccgataagccgtttgccaaagatattgtcgaggcggtgaaatcgccggcttatcgcgcggttatcgacgatccaaagaatatttatagcgccttccagaaaccggaatggatgaccgcgacaccctgatcgcagcggtggccatccccaatttctgaggtgaatatgattgaaatagaaaaagtctgcgtcgattttaccgccggtcgcggtacccccacgcgcgcggtggatgatgtgagcctgcatatcgccgcgggcgagatttttggcattgtcggtaccagcggcgcaggaaaaagcactctgctgcgtaccctgaacgccttaacgcgtcccagtcaggggcgcgtcaacgtcaacggcgtggaaatttcggcgctggacggaaaagcgttacgccaggcgcggcagcgtattggtatgattttccagcattttaacttaatgcatacccggacagtggcgcaaaacgtggcgtttagcctgaaagcggctggctgggaacgcagcaaaatcgcgccgcgggtggcggaaattttaacgctggtgggccttgccgataaagcgaaccgttttccggtacagctcagcggcgggcaaaaacagcgggtggggatagcccgcgccatcgctaaccatccggatgttttgctgtgtgatgaaccgacttccgctctggatctggaaacttccgccacgattctggccctgctcagacagatcaacgcacagcttgggattactattgtgctgatcacccatgaaatgaacgtgatcaaatctatttgcgatcgcgtggcggtgatgtcgggcggtaaggttgtggaatcgggcgaggtgtttgatgtgtttgcccacccgcaacacgctttcacacagcaactggtgtctcatacccttaatttgaccctgccggaacgtttacgggaacacctgcccgggcagctgctgaaaattttgtttatcggcgattcggcggagcagccggtactgtcggaggtggcgatcaagtttggcgtcgcggtcaatatcctgcatggcaagattgagtatatcggcgaacgcgcgttgggcattctggtggtgcaattaaccgcgccgcataatccaacggcggtggccgccgccgtggagcatatccgtcaacgtactgcacaggtggaggtgatccgtggatgatttattgccggatttaacgctggcgttcaatgaaactttccagatgttgagtatttcaacggtgctggcgattcttggcggtctaccgctcggttttctgatttttgtcaccgatcgtcatctgttctggcagaaccgttttatttatctcgtcgcctcggttctggtgaatattatccgctcggtgccatttgttattttactggtgctgttactgccgctaacgcagcttttgctgggcaatacgataggcccgattgcagcctccgtcccgctgtcggtggccgcaatcgcgttttatgcacgcctggtagatagcgcgctccgtgaagtcgataaagggattattgaggcggcgctggcattcggcgctagtccgatgcgtattatctgtaccgtactgttgccggaagccagcgcagggctgctgcgcggcctgacgattacgctggtaagcttaatcggctactcggcgatggccgggattgtcggcggcggcggggtaggcgacctggcgattcgctatggctactaccgttacgaaaccgaagtgatggttgttaccgtagtggcgctgattgtgctggttcaggtcgttcagatgctgggcgactggctggcaaaacgtgccgacaagcgcgacagacactaagccggctcaatgtagcgtcagccggcaataaaagtaagctattgcgcttttagccagttggcaacgtcttgccatgtgccgcgaaaaacgatattcgcggcttttttctccagttgatagcgatacattgggtcgtaatattcgttaagtagcggaaccagccatgccatatggccgtcagtgctgccgctggataattgctctgccagcgccctatccagcgtgtccgtcagttcggcaaagcgttgcaaccccagacggcggcgaatagcgaacagtccatgatgaagatattcactatacgcctgccaaccggcttcatcgccgtaggcgtgggtgaagtcgtgatgcatacggatgaaatactcttcacgcagtcgttccagacgaagcgcaaacggatcttccactaccgcaatgggggcctgcgccattctttcgcgtaaacactcaggcagatggttggcgccgatcgttcgcccttcatcttccagtacccacctttttagcgtctgacgcgcgttaattttcagcaattcaacggcaagtttgttttcaaaactggcctggctgagctgggggttcagcgtgcggccaaaagaggagccgcgatgacgcgcgagaccttccagatccacgccgttgggctgttgtcgtaccagttgcgttttgccgctgcccgtacagccgccaattaaaagtatcggtttttgcgccagttgccaggtcgcctgaattgctgtctggcgcagcgctttatagccgccttcaataagcgggcagtcaatccctgtttcttgcagccaacgttgtacgatatgtgaccgctgaccgccgcgcgcgcagcacagatacccgttggggaaacgttgatacgcggctttccaggcctcaagccgctgctggcgaatgtcgccgcaaaccagccgatgccccagcgctaacgccgcatccgcgccctgacgtttgtagcaggtgccgacggcggctcgctcgtcatccatcatcaatggcaggttgatagcgcccggcatggcgccctgttcaaactcaatcggcgcgcgtacatcaattaaaggcgtatcggcaaggaggagcgcgcgatagtcctgtgctttttgtctgtcttgcataacgtaaaacgtaaccttaaatcatcctttgcgctattttacgcgccaattcgcaaagtggcttgatttttaacagcgtaccgtgttgaaaatggataaaaaaccggctatttcgggttgccgttgggtaaataatttcacaatgtcttctaccgctttgcctccgccaaatttatgccaggcgaggcttaacggtgagggcggacgcatcgtcgggatggtacagctcaccagttcgtttttgtcgatcagcgtttgacaaagcggctgcgggacaaaaccgataccgacgcctgccagatgagcggcgattttggtttccatatcaggcacgataatttccttctgccccggaaggcgccaggctacccgcttggtcagcgtacgcgcgctgtcttcgatattaattgccgggaaacggcgcaactgcgcttctgttagaggcccgctgacgtgagctaaaggatgatccgcggacatcacaaaacgccattgtacggaacctaaagggtcgagcataaaggtattagccaacggctcggtgccagttacgccaatcgccagcgaaaaaccttcatacaggagcgaatcccagacgcccatataaatttgccgggaaaagtgaaactgggtgaaagggtaacgcgcattaagccacgataagagactggcgaccgcttgcgggctatagagcaggttattcaccacaatattgacctgacgctctacgccgtcgttaacctggcgtagctcgtcaggcatgctgtccagccacgcaagccagtcttttgcctgagagagaaggtgagagcccgccgccgtcaacgagacgcttcgcgttgtgcgaaagaacagccctacgccggtattttcctccagcagtttgatgcggtagctaatggttgccgtggttttacacaggcgctccgccgctttggagaaactccccgtttcggcaacgctgataaaggtacgcagtgtttccgggtcaaacatcgtcagacgcctccttacgatcctgataaaaccagaattgttttcctatgatttttaagtagttttacataatagccatgtttgatttgtggtctaaatctacttttggaaaaatattccaacttttatgttgatgttaaatcccgaaggttttagattgcatggtattgaaaccggacagagtccaaaccgcggttaaacggaatcgagctacaagggaaaaataatgaaacttgaggtattaccgttagatcagaagacgttcagcgcttatggcgatgttattgagacgcaggaacgtgaattttttcatataaacaacgggttagttgagcgatatcacgacctggcgaaggttgaagttctggagcaggatcgcacgctgatcagtattaacagggcgcaaccggccgcgatgcctattgtggtacatgaactggaacgtcatcctttaggtacgcaggcgtttgtgccgatgaacggcgaggcttttgtcgttattgtcgcgctcggcgatgataaacccgatctctccacgctgcgggcgtttattagcaacggacggcagggcgtcaattatcaccgtaatgtatggcatcacccgctgtttgcgtggcagacggttaccgattttctgacggtggatcgcggtggcagcgataactgtgatgttgaaagtatcccgacacatgaactctgttttgcgtgacgctattggccttcttgcataagatgaacatattgttcattgtttatgctcatattttgggccggagttaacgtaaatatgacggaagtaagacgacgcggcaggccaggacaggcagagccgactgcgcagaaaggcgctcaggcgctggagaggggcatagcgatattgcaatatctcgaaagaagcggcggcagttcatcagttagcgatatttccggcagcctggatttaccgctttctacgacgtttcgcctgttaaaggtactgcaagcggctgattttgtgtaccaggatagccagcttggctggtggcatattggtttaggcgtatttaatgtgggctctgcgtatattcataatcgcgatgtcctctcggtagccgggccctttatgcaccgacttatgctgctttctggcgagacggtcaacgtagcgattcgcaacggtaatgaagcggtgttaatcggtcaaaaggagtgcaaatcgatggtcagaatgtgcgcgcccttagggagtcgtctgccgttacatgcttccggcgccggaaaagcgctgctttacccgctcaccgaagaagagctggtggggatcgtcgtcaataccggtttgcggcggtttacgccgaccactctggtggatttacctatcctgcttaaaaatctggagcaggcgcgtgaacagggctacaccgtcgaccaggaagaacatgttgtcgggctgaattgtatcgcctccgctatctatgacgatgcgggcagcgtggtcgccgctatctcgatatcgggaccggcttcccggctgacggaagatcgctttatcagccagggtgaactggtacgggataccgcgaaagacatcagtacggcgcttgggctaaaaccccctgtagcctgagccgcatcccgctcgctggagcgggacttttttaaaatttttaaaagttggaaactttttccaataaaaagaggtagcaataaaatggcaaaaatgagagccgtggatgcggcaatgtatgtgctggaaaaagaaggtatcaccacagcattcggcgttcctggggctgcaatcaaccccttctattctgcaatgcgtaagcatggaggcattcgccatatactggcgcgtcatgtggaaggcgcttcgcatatggctgagggctacacacgtgcggcggcaggtaatattggggtctgcctgggcacttccggcccggcgggaaccgacatgatcaccgcgctctattccgcttctgccgactccatcccgattttatgcattaccggccaggcgccacgagcgcgtctgcacaaggaagatttccaggcagtcgatattgaagcgattgcaaaaccagtcagcaagatggcagtgacggttcgtgaggcggcgctggtgccgcgcgtattacaacaggcttttcatctgatgcgctcaggccgcccaggtcctgtgctggttgatttaccgtttgatgtccaggttgcggagatcgaattcgatccggatatgtatgagccgttgccggtatataagccagccgccagccgcgtacagattgaaaaggcgctggagatgctgattcagtccgagcgtccggtaattgtcgcgggcggcggggttattaacgccgacgccgcgccactgctgcagcagtttgccgaactgaccaacgtaccggtgatccctaccctgatgggctggggctgtatcccggacgatcaccccttaatggcggggatggtcggcctgcaaacggcgcaccgctacggcaacgccactctgctggcatccgatatggtttttggcatcggtaaccgcttcgccaaccgtcatacggggtccgttgagaaatatactcaggggcgaaaaatcatccatatcgatattgaaccgacgcaaattggtcgcgtgttgtgcccggatctaggcatcgtttcggacgccaaagcggcgctaacgttgctgatcgatgtcgcgcaggagatgcaaaaggcggggcgtttgccatgccggaagacctgggtggacgaatgccagcagcgtaaacggactttgctgcgtaaaacccactttgacaacgtgccagtgaagccgcagcgcgtctatgaagagatgaacaaagcctttggtcgcgatgtgtgctatgtcaccaccattggattgtcgcaaatcgcggcagcgcagatgctgcatgtgtttaaagacagacactggatcaactgcggccaggcggggcctcttggctggacaatcccggcggcattaggggtttgtgctgccgatccgcaacgcaatgtggtggcgatttccggcgatttcgacttccagttcctgattgaagagttagccgtcggcgcgcagtttaacattccgtatatccatgtgctggttaacaacgcttatcttggtctgattcgccagtcgcaacgcgcatttgacatggactactgcgtacagcttgcctttgaaaatatcaactccagcgaagtgaatggctatggcgttgaccatgtaaaagtggcggaagggttaggctgtaaagcaattcgtgtctttaaaccggaagatattgcgcctgcatttgaacaagccaaagcgctaatggcgcaatatcgcgttccggtggtggtggaagtcattctggaacgcgtaaccaatatttccatgggcagcgaactggataacgtaaccgagtttgaagaggttgcggatagtgcgaaagatgcgccaacagaaacctgttttatgaaatatgagtaagggaggtaatcgatgttacgtttctctgccaatctttctatgctgtttacggaatatgatttcctggaacgctttgataaagcggcgttgtcgggatttcgcggcgtggaattcatgtttccctacgataacgacatcgaagtgttaaaacgtaagctcagggataataatctggaacatacgttacataatttacctgctggcgactgggcggctggcgaacgtggaattgcctgtattcctgggcgcgaagaagagtttcgcgatggcgtagcggccgcaatccgctatgcacgtgcgttaggcaataagaaaataaattgtctggtgggtaaaacgccgtcaggattctccgcaacggagatccacgacacgttggtcgaaaacctgcgctatgcggcaaatatgctggcgaaagaagacattttattacttatcgaacctattaatcactttgatatgccgggattccatctcaccggcactcaacaggcgttagcattaattaaggatatcggcagcgataatatcaaaattcagtatgatatttatcacatgcaacgcatggaaggggagttaacgcaaaccatgacggcatgggccgataaaataggccatttacagattgctgataacccgcgtcgcggcgagccggggaccggggaaattaattatgactttatttttaatgtcattaaacagtctggttatgatggctgggttggctgtgaatataaaccactgactaccacggaagcgggattatcgtggattaatcagtaccgttaaaacgcagaataattcgggcagcgcttttttttccactgtgttggaaggggattgtgttgcctgaatctggaaacaccgaaagcaataaaagaggttgtatatgaaactgggatttattggcctgggaattatgggctcgccaatggctatcaatttggcacgcgccggtcatcaattacacgttacgactattggtccggtcgcggacgaactgctctcgctgggggcggtaaatgttgagactgcacgtcaggtaactgaatttgcagacattatcttcataatggtgccggatacaccgcaggttgaagacgtgttatttggcgaacacggttgcgctaaaacatcgcttcagggaaaaaccatcgtcgatatgagttctatttctcctatcgaaaccaaacgttttgcccagcgcgttaatgaaatgggcgctgattacctggatgccccggtttccgggggagaaatcggggcgcgtgaaggcactctgtcgattatggtcggcggcgagcagaaagtctttgaccgcgttaaaccgctctttgacatcctgggaaaaaatatcaccctggtgggcggcaatggggatgggcaaacctgtaaggtggctaaccaaattattgttgcgctgaatattgaagcggtttctgaagccttagtgtttgcttcaaaagcaggcgccgatccggtacgcgtgcgccaggcgttaatgggcgggttcgcctcttcacgcattctggaagttcacggcgagcgcatgatcaaccggacgttcgagcctggtttcaaaatcgcgcttcatcagaaagaccttaatcttgcattgcaaagcgcaaaagcgctggcgctgaatttaccgaatacggcgacctgccaggaattattcaatacctgtgcggcaaatggcgggagccagcttgaccattcggcaatggtacaggcgctggaattaatggccaatcataaattgtcctaattatgtgtatcgctgcggctgcagcgatacctgttcacaaggaacactctgtaaaggtgaagaacatgagtgaaactaaaaaatccggaattgattactggaaacaaattgttgtcgtaatgagtctgggctgggtagcgatttggatctatcgcaccgtgcttacgccaatttatccagaaattcaggcatctttagacaatgtaagtaatgctgaaataggcgccattgcaagtttttacttttttgcttactgcagtatgcaaatcccttgcggaatattggtcgataaattcggtcaaaaaatcatgctgatggccggatttacgctttttattattggtacactctgtatcgcgaaagccaatggcctgaccatgatctatatagggtcgctaatggcaggtggcggatgcgcttctttctttagctcggcttattcactctcttcggcaaacgtgccgcaggcccgtcgggcattagccaacgcaattatcaacagcgggtcggctatagggatggggattggcttaatcggttccagcatattagtaaaaaacatgagcatggcctggcaaaatgtactgtatatcgtggccgcgatattagtaatcatgctgtgcgtctttacgctgatcattcgcggtaaagccaaaagcgactctgcgcaagcggaaaagcaaacccaaaccgttacggaagatgagaaacgcgcgcctttattctctggtttattgtgtagcgtttacttcctctatttctgtacctgctacggttattatttgatagtgacctggctgccctcttatctccagactgaaagaggatttgatggcggagctatcgggctggcatcagcgctggtggcggtggttggcgtaccgggggcgttattttttagccatctgtcagataaattccgtaacagtaaagttaaggttattctcggtctggaaattgtggcggcagcaatgttggcgtttacggttttgtccccgaataccacgatgctgatggtcagcctgacgctatacggcttgctggggaaaatggcggtagacccgatcctgatctcctttgtatctgaacaggcttcggcaaaaagtctgggaagagctttcagcctttttaacttctttggcatgagttcagcggttgtcgccccaacgttgaccggatttatttcggatgtaacggggtcgaaagagatcagttttgtgatttcagcatgtttagtggtcaccggaacgctgatctttgctgtcgtcactttatataaaaagaaagcaacgcaacgtattgcttcagcttaaaaataattatatctactaattctttattttatatttatttgttcctcatagctaaacccataacaacgttatccgatgcgtgaaaagagggatttatggaacatcaaagagagctataccagcagcgcggttatagcgaagacttattacctaagacagaaacccaacgaaactggaaggcatttaactatttcaccttatggatgggatctgtacataacgtgccaaattacgttatggtcggcggtttttttatactggggctatcaacatttaatatcatgttggccattattatcagcgcattatttattgcggcggcgatggtaatgaatggcgcggcaggcagcaaatatggcgttccttttgctatgatattgcgaggttcttacggtgtccgcggcgcgctattccctggattattgcgagggggaatcgcggcaattatgtggttcggcttacagtgttacgcgggatcgctggcatttcttattttgattgggaagatctggccaggatttctgacattaggcggagatttcaagctgctgggtctttcactgccaggactaattacttttctaattttttggattattaacgttggcatcggttttggcggtggtaaagtattaaataaatttaccgctatcctcaatccatgtatttacattgtctttggcggcatggctatttgggcaatatcgctggtcggcattggcccgattctggactatctgccttcaggcgtgcaaaaagcagagcacagcggctttctgttcctggtggtgattaacgccgtagtcgccgtctgggctgcgccagcggtaagcgcgtccgatttcacgcaaaacgcgcattcatttcgcgctcaggcattgggacaaacattggggcttatcgtagcgtatatattattcgccgtagccagcgtgtgcattattgccggagccagtattcattatggtatggatacctggaacgtgctggatattgtgcagcgctgggacagcttgtttgcttcattctttgcggtgctggtgattctgatgacgacaatttcaaccaacgccaccggtaatattatacctgcggggtatcaaattgcggcgcttgccccgacaaagcttaactataaaaatggcgtaatgattgccagtattatcagtctactgatttgcccatggaaattaatggagaatcaggacagtatttatctgttcctcgatattatcggcggtatgcttggcccggtaatcggcgtaatgttagctcattattttgtggtaatgcgtggaaaaattaatcttgatgagctgtacaccgccagcggtgattacaaatattatgataatggatttaacctgactgcattttcagtcaccctagtcgcagtcattctgtcattaggcggcaagtttataccatttatggagcctttatcccgcgtgtcctggtttgtaggcgtaatagttgcgttcgttgcttatgcgctattgaagaaacgcacgggttttgaaaatacaggagagaaaaaactcgcaggttaaatattgaaaaagcattaagcgtatttaatgaagtgtgcgctatttaaaaactatctgtatccatacaaggagtttgttatgtcttttgatttaattattaagaacggtactgtcatcttagaaaacgaagcgagagttatcgatatcgccgtccagggcggaaaaatcgccgcgattggcgagaacctgggggaagcgaaaaatgtgctggatgcgacgggattgatcgtttcgccgggcatggttgacgcgcatacccacatttctgaaccgggccgtacccactgggaaggctatgaaaccggtacgcgcgcggcggcgaaaggcggtattaccacgatgattgagatgccgctcaatcagctgccggcgacggtcgatcgtgagacgattgaactcaagtttgacgcggcaaaaggtaaattgaccatcgacgccgcgcagttgggcggtttggtctcttataacctggatcggctgcatgagctggacgaagtgggcgttgtcggcttcaagtgctttgtcgccacctgcggcgatcgtggcatcgataatgattttcgcgacgttaatgactggcagttttacaaaggcgcgcaaaaactgggagagatggaccagacggtactggtacattgcgaaaatgctctgatttgcgatgagctgggcgaagaagctaaacgcgaaggtcgcgtaacggcgcatgattatgtcgcctcacgtccggtatttactgaagtggaagccattcgtcgcgtgctgtatctggcgaaagcggcaggttgccgtctgcacgtttgtcatatcagcagcccggagggggtagaggaagtaacgcgtgcgcgtcaggaaggccaggatgtcacctgtgaatcgtgcccgcactattttgtcctcgataccgatcagttcgaagagattggcaccctggcaaaatgttctccgccaattcgcgaccaggaaaaccagaaagggatgtgggaaaaactgtttaacggcgaaatcgactgcctggtatccgaccactctccatgccctccggaaatgaaagcaggcaatatcatgcaagcatggggcggaattgccggactgcaaaactgcatggacgtcatgtttgatgaagcggttcaaaaacgcggtatgtcgttgccgatgtttggcaaattaatggcgaccaacgccgccgatatttttggtctgaaacataaaggacgtattgcccccggcaaagatgctgacctggtctttattcagcctgacagcagctatgttctgaaaaatgaagatctggaatatcgccataaagtcagtccgtatgttggccgtactattggcgcgcgtattaccaaaacgattttgcgcggcgatgttatttatgacatcgagcatggcttccctgtgccgccaaaaggtcagtttatccttaaacatcagcagtaatccggtgtgatttaatgcccgtcgtcacgacgggcattctctattttaaggtgtggatatgttccctgttattaaccgcgaaagtgtgttgtccggctttcagtggtttttctttattttctgtaacactgttgtggttccccctaccttgctatccgcttttcatcttcccgctgataacctgttaatgctcacacaatacgcttttttgaccaccgcgttggcctgcctggttcaggcattttgcggccatcgccgtgccattatggaagggccgacagggctgtggtggggcgctattcttacgattacgcttggcgaggcgtctcgcggcacgccgctgaacgatatcgcctccagcctgtcggtcgggatcgcgatctccgcaatggtgacgatatttatcggcattagcgggttaggacaccgtctggctcgcctgtttacgccggcggtaatggtttttttcatgctgcttttgggcgcgcagctgacctcaatattttttaaaggcatgctggggctgccttttggcattgccgataccagcgccagaatcaaattggccccctttgggctggcggtcgcggtgatgtgttttatcctcgcgatgattattttcctgcaacagcgtatctcccgttacgcgttactggtagggaccgtggtcgggtgggggctatggcggttatgctttccttcatcacacttaccgccgggtgaattaagctggcgatggtttcctctgggcagccacggcacgctgatgccgggtattattgtgacggcggtgatgacggggttagtcaacatcagcaacacttacggcgccatccgcggtaccgatatcttttatctgcatcaagggtcgggcagttctcgttatcgccgaagctttatgatttccggactgatgacgttagtgacggtgcctttcgcggtcgtgcctttttcgccttttgtatcttccattggtttattaacgcaaaccggcgacagttctcgcaaatcctttatctgcggtagcgcgctgtgtctgctggttgccattataacgccgttaacccgcttattttgcgctattccactggcgatcagcagcgccgttatgctggtctcttatttacctttactttattccggtttggtttttagccagcaaattacgtttaccgcgcggaatatttatcgcctggcattaccgctttttgtcggcatttttttgatggggcttcctccggtctatttacaggatcttccactgatgattcgtcctctgcttagtaacggattactggtgggaatcttactggcagtgcttatggaaaatcttattccgtgggaacgcattaaataacatgagaaaacaaggagacatgatgaagattgtaattgcgccagattcatttaaagagagcttaagcgctgataaatgctgtcaggctattaaagcgggattttcaaccgtatttcctgatgcgcgctatgtctgtttaccgatcgccgatggtggagaaggaaccgtggacgcgatggtggcagcgaccggcgggaaacgggtttctgtggacgttagcgggccgatgggggaaaaagtaaacggattttatggcctgaccggcgacggcaaaacggcgattattgaaatggcggcggcgagcggattgatgctggtggcgcccgaggcgcgtaatccgctgctggcatccagtttcggcaccggcgaattgattcgtcacgccctggacgcggggattcgccatattattctgggtatcggcggcagcgccacggtggatggcggaatgggagtagcgcaggcgctcggtgtgcgttttctggacgcgcaaggaacgccgcttggcgccggagggggcaatttatcgcgcctggcgagcattgacctgcaggggtgcgatccgcgaatttcagagtgtcgtattgaggtcgcctgtgatgttgataacccgttggtagggccacgcggcgcggcggcggtattcggtccgcagaaaggggcgacgcctgaaatggttgagacgctggaaaatggattacgtaattatgcccgtgttttacatgccctgaccggacgcgacatgtctcaaataccgggcggtggagcggccggaggaatggggattgccgctatcgtcttcctggaagcggaaatgaagcccggtattgagattgttatgcaggcggtgaagctggaggaggcggtaaaagaggcctcgctggtgattaccggagaagggcgaatcgactcgcaaacggcgggaggaaaagcgccgataggcgtcgcgtcagtggcgaaacggcatcatgtcccggttatcggcattgccggcgtactgggcgacggcgtggaagtggtccatcgccacggtattgatgccgtattcagtattttgccgcggctggcgcctttgccggaagttctggcgaacggtgaacaaaatctctaccacagcgcctgtaatattgcccgcgtcatcaaacttggccaggacatcgggactcgttaagcataaaaaaagccacggttctcaccgtggcaaaatccaacatagctaaattaaaaataatcaggagggctgcccgccgttaaatcataacgtcgcggttacagtctttggagtagatgtagctgaatgcttcgccacgacctacaccgtatccggcctgcagggaataagcacccatgaagatgtagtcgccttttttcaccggcacccagttgttgtcgaggttataaaccccctggccggaaaggatataagcgccatgttcctggacgtgggtttcaatatagccgtggctggcgcccggttcgaacgacagaatatgcatattcatatcgaagcccagctctttaggcaggaaatccagcagaataacatcttccatgccttcataatgaatacgctccagctggctggcattgccggaaaccaaccacggggcatgcccctcgacaggagtatagcggcgtttatataaaaatagctggctgtcttccgtttgagcgttgctaaaggtcatcatctcgcccggtggacaatagaggtatccgccctgggttaaagagaatgtttttccttcagctttagcttcaatatttcccgcaatgacatagagaaaagtttcaatcccctcgccgccaaagccctgctggttgccgccattctgatgtaaggtgaccagataatcgacgaaagaagcacccagcttcggcgtcgaaaggatggtgacgtcacagttttcaaagccgggaataatatttttcaccagaccgtccggcgttaagagcgcatagttaccgtgtttcacaatggcgcggttcgccagtaaatcatcgcggtaacccgtgacgttattcagatatcccattgatggctccttatttttgccaggcaagttgatgcagcattaatgccagagttttgaccccttcagcaaggtcattaatgttggtacgttccgccgggttatggctgataccattaatgctggggacgaaaatcatacaggtagggacgcgcggcgcgaaaatttgcgcgtcatgacctgcgccgctatgcattatgcgatagttcagttgttcggtttcacacagcctggtgagggccgcgaccagttcggcgttcatcggcaccggcgcttcgtccatccacaaatcgatatcgatgctgatatccatttcatcgcagatggcgcgcatatcgttttccaactgttcggtaaattcgcgaagtacggcggcgtccgtatgccggcaatcgattgtaaatgtggtttttccagggactacattgaccgtattcggctgcggctcaactttgccgaacgttaataccaggggatcgccatgctgtttggctttttcaatggactgactgcaaatacgactgaaggcgtgcaccgtatcgcgacgatagcccattggcgttgtgcctgcatggttggactcgccgttgagcgtcaccgtgtagcgacgttgcccgacgatggcgttgacgacgccaatcgactgtccgttgctctccagaacgcagccttgctcaatatgcaattcaacaaaggcgcggatatcggttcgcgcagcgagcggcgcggcgggaagggtaaatccgcacgcctgcatagcgtcgacaaagcctgtgcctttggcgtcctggatatggcgtacctcttcaggattcgccaggccaaaaatgttcttgctgccccaaaaaacgtaagggaaacggctgccttcttcctcagccattgacactacctcgacggtgcgcagcggcgcgccgtaggtcgcttttagccagtcgagcgccagccaggcggcaagcgcgccgaattgcccgtccagattgccgccgttgacgaccgtatcaatatgcgaaccgcttaaaatcacctgctccggaaattgtgtgccgcaaaggcggccatataaatttccgacgtcatcaaagcgtgtctccagaccgctttctgccattcgctttttaaactgctgctgtgtttccagccactcaggcgaataaagtaaacgcgtcattccgcctgtaggatcggctccaatggaagagagccagggcaatgtttcttctatcgcgtggcgaaaatgctttatcatagaaaattcctgtttcaataattattgggcaaagggattttttgtttcgtatgacttgagatagagggcatcggaaatcagatattgataaatatcatcaacaatatcgataccattcatatcggcatttttctgtttaatatcctgatcctgtccaggataataaacctgtttaaaaccgggggcgggcttcacggcattgagttcctgcatggtctgactaatatgtttgcggaataattcacaggaagaaaagaacgccggattaatgaccagatgaagttgtcctaaattgcgtccggcgtgtaaatcttcatacatcgaactgacctggcggccaaacggcagccccagcagaataccggacagaatatcgatcatcatcatcaggccgtaacctttcgggcctgcggcgggtaataacgcattgacggcaaaaggatcatgtgtcggcgcgccatttttatcaacggcccaactctccggaatggactcattgcgggaccgtgcatcgaggacttttccccaggcctgcacggtggtggccatatcaaaggtaatgatgtcatcgccttcgcccggcgcggcaaaggccagcggattagtgccatagtaaatatccgccccgccaaacggcacgaccataggatcggactgacagatagacagaccaatcaggccttcgcgagcagcctggcggacgaaataagagatggcgccgctatggcccattctgctaatgccgacaaccgcgacgccattttttttggctatttcaatagcatgctccattcccattttggctgcgacctgtccggcagcattatcggcatgcagtatcgccgtacagggaccggtattctcaatgcggaacgtcggctcccggttggtgccgccttttgaaattcgttcggcataatattcaacgcgtacggcgccatgtgagtgaatacctctggcatctgcataaaccagtacgtcggcgacgatggcggcgtgctcacgttttagtccggctttataaagcttattttcgataagctgatggagtgtttcccgactgattttcatctgtcttcctttttaacgacggtgtgaagcatgactgcgattaacataccgggaaaataaaatgattatgtgatccagacaggcaaaaaaatataattagaatttatttgataatcaggcgggttttatctttttgcttaaataaaaagcttttttagaaaatcataactaatcctttagccgttgtttgaattcttttgttaataaatttgatgtgacgttaatcactctatttaccctcccggatatataccgtgaagcgcacattaacactgctcgtgcaattgcaatgggtgcaattgcaatgggtgcaattattaaggagttgttatgatccacgcctttattaaaaaagggtgttttcaggactctgtcagcttaatgattatttctcgaaagctgagtgagtccgaaaatgttgatgatgtatcggtaatgatgggaacgcctgcgaataagtcgctgctggaaactaccggtttctggcatgacgattttcatggcgctacgcccaatgacatttgcgtggcgattcgtaccgaagcggtagatgacggcattacgcaagtgattgtgcaacagctcgaagaagcattgcagcagttggcgcagggaagcagcggcagccagtcgttaatccaggtcagacgctgggaaagcgcctgtcagaaactgccagaggcgagtctggcgctggtatcggtggccggcgaatatgcggcggaactggcagagcaggcgctggatcgttcgttgaacgtgatgatcttctccgataatgtcacgctggacgatgaaatcagactaaaacgccgggcgcgtgataaaggactgctggtcatggggccggattgcggcaccgctatgatcgccaatacgccgctggctttcgctaacgtcatgccagagggcaacatcggggtgattggcgcttccggcaccggtattcaggagctctgttcacagattgcgctggcgggggaagggattacccatgccatcgggcttggcggacgcgatttgagcgccgaagtcggcgggatcagcgcgctaacggcactggagatactcagcgcggatgaaaagagccaggtgctggcctttgtctccaaaccgcctgccgatgcggttcgtcagcatattatcgcggcgatgaaagccgccgggaaacccgttgtagcgctgttcttagggttttcctcccccgttgcgcgtgaggaaaacgtctggtttgcctcgacgctggatgaagccgcccgactggcatgtttattgtctcgcgtgacgtcgcagcgtaaagaaatggtttcaacaggcggcgtgattcgtggtctctataccggcggaacgctggcggcggaagcggcggggctgctggccggctatctgggcgtcgcggcggatacggaacatcaccatggcatgatgcttgacgctgacggccaccagattatcgatctgggcgatgacttttataccgttgggcgaccacatccgatgattgacccggcgttacgtaatcagcttatcgccgggcttggcgcacagccgcaggtacgcgtgttattagtggacgtcgttattggttttggcgcgaccgccgatcccgccgcatcgctgattcaggcctggcagaaggcatgcgacgcacgcgccagagaccagccgctgttcgccatcgcaaccgtcaccggaacggaacgcgatcctcagtgccgctcgcaacaaatcgccgcgctcgaagatgccggcatcacggtagtggattcccttcccgaagccactctgttggccgcggaactgattcgacccactctctcttctactcatccatcagccccccggttactggaagcggtggcggtgattaatgccgggttacgtagcttcgcgctggatttacaggctgccggtatgcccgtggtgcactaccagtgggcgcctgtcgctggcggtaataaaaaactggctcgtctgttagaacgtttgcaataaggggttcccatgtttacatcagtggcgcaagccaacgctgcagtcatcgaacaaattcgtcgcgcacgtccgcactggctggatgtgaagccagcttcttcattaattagcgtgctcaatcaagggaaaacgcttcttcatgccggcccgccgatgcgctggcaagagatgaccggcccgatgaaaggcgcctgtatcggcgcatgcctgtttgaaggatgggccaaagatgaaatgagcgcgctcgcgctgttagagcagggaaaggtcaactttattccctgccatcacgttaacgccgtggggccgatgggcggtattacgtcagccagtatgccgatgctggtcgtggaaaatatcaccgacggcaatcgcgcgtactgcaatctcaacgaagggatcggcaaagtgatgcgtttcggcgcctatggcgaggatgttcagcaacgtttgcgctggatgcgcgatgtgctgatgccggtattaagcgcggcgctgggacgtctggagcgggggctcgacctgaccgcaatgatggcgcagggcattacgatgggagatgaattccaccagcgcaatatcgcctcttccgcattgctgatgcgcacgttggcgccgcatatcgcccgtctggaacacgataagcagcagatagcggaagtgatggattttctgagcgtcaccgatcaattcttccttaatctggcgatggcctactgtaaagccgccatggacgcgggcgcgcagattcgcgccggcagtattgtgacggcgatgacccgcaatggcgatatgtttggcattcgggttagcggtctgggcgaccgttggttcaccgcgcctgttaatacgccacaggggctattttttaccggtttttcgcaggatcaggccaacccggacatgggcgacagcgccattactgaaacgtttggtattggcggcgctgcgatgattgccgcgcctggcgtaacgcgttttgttggtgccgggggaatggaagcggcgaaatctgtttctgaagagatggctgaaatttatctcgaacgcaacatgcagctacaaatccccggctgggattttcagggggcctgtctgggactggatatccgccgcgtggtcgagaccggaattacgccgctgattaacacgggtatcgcgcataaagaggcggggattggccagattggcgcgggaaccgtccgtgcgccgctggcctgtttcgagcaggcgctggaagcgctggcggaaagcatgggcgtaagttaagagagcgtctcatgaaacgtatccatcctcttatggcaagccgacaatcggcggattatcggcaaccctggcagatgtcaggggtatggcgtcgctctattaattttgtggcgaaaagcggtgagttattaacgcttcaccgtcgggggagcggcttcagtccgggagggtggatactgcgcggcggcgattttgacgccttgcgcgatgtgctcaccgatggcgaaaaaccgcagtcaaccgctgccggtattcagattggcgagtttcttttatgcgagccggagaggcgctgttcgctgcgggttccacgctatcttgcgtcgccgcgtcttaacgcgacgtacatgcagcgtagtgaggagacggggctgtttgggccgttaaccgtcgccgcagctcagcctctatgtccggaacttcgccagttttgtcactgctttcagtcggcgcttgcaggtgctgcgactgactggcggctatggctgggtaaagggccgggcttaacgcccagtcatgacgacacgctgacgggaatgttgctggcggcctggtattttggcgccatagatgaacgcgccgggcgtaatttttttgcccaatccggcagccttgatcgggcgacgacgctcgtgagcgtcagctatttacgctatgcggctatggggtatttcgcgtcgcctttactccactttattcatgcgctgcgacgagatgctcgcacagaaacggcgattgacggactgctggcgctggggcacacctctggtgcggatacgctgctggggttctggcttggacaacaaatagtaaaaggatagggaatgaaaacgttggtagttgctcttggcggcaacgcattattgcagcgcggagaagcgctaacggcagagaatcaatatcgcaatattgccgacgcagtgcctgcgctggcgcgacttgcccgctcgtatcggctggcgatagtacatggcaacggcccccaggtcggcctgttggctttacagaaccttgcctggaaagccgttgagccttatccgctggatgtgctggtggcggagagtcagggcatgatcggctatatgctggcgcaacgtctggcgcttgaacccgatatgccgccggtgactgcggtattaacgcgaataaaggtatcggcggacgatcctgcttttcttgaaccggaaaagtttatcggtcccgtttattcgccagaagagcaaatggcgctggaagcgacttatggctggcatatgaaacgtgatggaaaatatctgcgccgtgtcgtcgcttccccggcgccgcgtcagattatcgaaagcgccgctattgagttattgctaaaagagggccatgtggtgatttgcagcggcggtggcggggtacctgttgccggcgaaggcgaaggggtcgaggcggtgatagataaagacctggcggcggcattgctggcggagcagatagcggccgatggtctgatcattttgacggatgcggatgcggtgtatgaacattgggggacgccgcagcagcgcgctattcgtcaggcttcgcccgatgagctggcgccgtttgccaaagccgatggcgcgatgggaccgaaggtgaccgcggtaagcgggtatgtgaagcggtgcggaaagccggcatggattggcgcgctgtcgcgtattgatgataccctggcgggcagggcgggaacctgcatctgtctgtgatcgcgacgggcggcaacagagaatgcgccgcccacgctgtttatttaagcttactttgcgcccagataatgccgctggcgtattcgcctggcaggagcggagagagcgcttccagggtggcgctaagacgtgacgtatcgctgtcggtcagattcagatggccgacttttcgccccggacgtaccgctttatcataccagtgcagatgtaccagcggcagcttcagccagtcgtaattcagctcgctgccgatcaggttgatcatcaccgacggggcgttaatcaccggcgcgggcaacggcaggccggtaatcgcgcgcaaatgcaattcaaactgactgatgctggcgccattttgcgtccagtgtccgctgttatgcacgcgcggcgccagttcattgattaacaggccttccggcgtgataaaacattccatcgccattacgccgacgtagttcagcgcctgcataattgctgacagcatcgattccgcctgctcctgctgttcggcgttcgcctgtgggaacgcgacgctggtccgcaagatgccgtcctgatgcaaattgtgcgttagcgggtaaaacacggtactgccgtcatgagcgcgcgcgccgactaacgacacttcgccggaaaaatggataccgcgctcaacaatacattcgccatagcagtcatccggcagttgcccggtttcgtccgcgcgtagacgccactgcccgcgaccgtcgtagccgccaacgcgacgcttaataatcgccagttcgcccaggcggtcaaagatgccggaccactcgtcggtgctggtcagcagctgccacggcgcggtcgcgagtcccagtttatcgaaaagctgtttttgtgtcagacggtcggcgatgatcggaaatacatcgcgattgacgaaggccgggtggcgcgccagctcgcgggtaagcgcggtttccggccagcgctcaatctctgcggtaatgacgctctgctgtaccggcacggcggtaggctctgcatccagaccaaccggccagacggcgatacccagcggttcgcccgcctggcgcagcattcggcccagttgtccgttgccgagaacgcaaacttgcttcatagcgtcccccgcggatcgggattttccagaacttcatcggtttgcgctttgcgccagtcggcaatgcgctgatgcagttccgcgtcgtgttgcgccagaatctgcgcggcgagcagggcggcgttagcggcaccggctttaccgatcgccagcgtacccaccggaatgccgcgcggcatctgcacgatggagtagaggctatccacgccgcttagcgcagcgctttgtaccggcacgccgagtaccgggaccagcgtttttgccgcaatcattcccggcaggtgcgccgcgccgcccgcgccggcaataatcacttgatatccgttctcttccgccgtttcggcgaagctgaacagtttatcgggggtgcgatgagcggaaaccacttctacatggtgcgggacatccagaatttcaaaaatttcggcggcgaattgcatggtagcccagtcgcttttggaccccatcacgatggcgacacgcgccggattattgcgggaagacatgcgtcttaaaactcctgtggtgcgggacacgctgcttttgaggtgtcagagaatagcatgataatcaggcaaggaaaacggttgcgtgcgcgccgtaacggacgattcgacgaacatttacagggggaaggcgattaactcaacgttgtccggcgtgacttttaccattgaaccttcatgatgccatgcgcctaacaccacgcggaatgcgggctggtcgttggcggaaagttcatgcaccgccgggcggtgggtgtgaccgtgaatcagccactgtacgcggtgtttttccatttcggcgacgacggtctgcgcattgacgtccataatatccagcgatttgctgctgttggcggctttactgccggcgcgcattctggcggcgatacggcggcggataaacagcggcagggtaaggaacagtcgttgcacccacggattatggactttggcgcgaaacgcctgatatccggcatcatcggtacagagcgtatcgccgtgcataatcaacacattgcggccatacaggtcgagcactttttcctgcggcagtagaatcatgccgctttcgcgggcaaagcgtttgccaatcaggaagtcgcgattaccatgaataaagaagcaggggacgccggaatcaaccagcgatttaatggcaacggccatttcacgatgtagcgggttggggtcgtcgtcgccaatccaggcctcgaagagatcgccaagaatatacagcgcgtcggcctgacgggcttctacggctaaaaaacgcagaaaaccggcgacgatcgccggttcttccgtttgcagatgcaagtctgcaataaacagtgtcgccacgattactcgctgacggtcacgttttcaatgatgacgtcttcttttggtacgtcctggtgcataccgctacggccagtggcgacgcctttgattttatctaccacgtccataccttctacgacttccgcaaagacgcagtagccccagccctgcagactttcgccggagaagttcaggaagtcgttgtctgccacgttgatgaagaattgcgcggtagccgagtgtggtgcctgagtacgcgccatcgccagcgtaccacgggtatttttcagaccattgttggcttcgtttttgatcgcctctttggtggctttctgtttcatgcccggctcaaagccgccgccctgaatcataaaaccgttaatcacacggtggaaaatggtgttgttgtaaaaaccttcgcggcagtagtccaggaagtttttaactgtttcaggcgctttatcatcaaaggttttgattacgatatcgccgtgattagtgtggaaagtaaccatttttgcatcctgttccaagagagtggtgctttagcccgcaatggggcacatataggggcttgttatagcataaccgtaagctgcgatcaccttgcaaagtgtgctgcttcgattacgaataatatgtatcatacggagattattacccacacacgtctatacggaatcttcgatgttaaaaatttttaatacactgacacgccaaaaagaggaattcaaacccattcatgccggggaagtcggcatgtacgtgtgtggtatcaccgtttacgatctctgccacattggccacggacgcacgtttgtcgcttttgacgttgtcgcgcgctatttgcgttttctcggttataagctgaagtatgtgcgtaacattaccgatatcgacgataaaattattaaacgcgccaatgaaaacggcgaaagttttgtcgcgctggtcgacagaatgattgcggaaatgcatcaggacttcgatgcgctgaatattctgcgtccggacagcgagccgcgtgcgacgcaccatattcaggaaattatcgagctcacccgaaccttaatcgagaaagggcacgcctatgtggcggataacggcgatgtgatgttcgatgtaccgaccgatccgacttatgggcagctttcccgtcaggatcttgagcagcttcaggcgggcgcgcgcgtagatgtcgttgacgtgaagcgtaacccgatggacttcgtgctgtggaaaatgtcgaaagagggcgagccgagctggccgtcgccgtggggcgaagggcgtccgggctggcacattgaatgttcggcgatgaactgcaagcagttgggcaaccattttgatattcacggcggcggttccgatctgatgttcccgcaccatgaaaacgagattgcccagtctacctgcgcgcatgacggcgaatacgtcaactactggatgcactccggtatggtgatggtggatcgcgagaagatgtccaaatcgctgggcaacttctttaccgtgcgcgacgtgctgaaatactacgatgcggaaaccgtgcgctacttcctgatgtccgggcattaccgtagccaactgaactacagcgaagagaacctcaagcaggcgcgcgcctcgctggagcggctatacactgcattgcgtggaacggataaatcagcggccccggcgggcggcgaggcgtttgaagcgcgtttcgtggaggcgatgaatgacgatttcaataccccggaagcctactccgtcctgtttgatatggcgcgtgaagtcaaccgtctgaagggcgaagatatgaccgccgcgaatgcgatggcgtctcatctgcggaagatttccggcgtgctgggactgctggagcaggagccggatgttttcctgcaaagcggcgcgcaggcggatgacggtgaagttgcggaaattgaagccttgattcaacagcgtctggatgcccgtaaagcgaaagactgggcggcggcggacgcggcgcgcgatcgtctcgctgaaatgggtattattctggaagatggcccgcagggcaccacctggcgacgtaagtaagcgcttttacaggccgctctatttgcatagaacggcctgttttttattttttcgcaccgggcgaaagataaacacacaccgactcccccagattctgatgttcacacccgggtattgcccggctgtaatgggcaataaagcggatgacgctgtcgccgctgtttagccccacatttccttttcgcagcaattctgctggctgatcgtcggtgaaaacgttaggggtgaacagttttgcgcctaatcgttcaaaagtgccagcactaacgatagagggttgataaccctgaagctgcaaccagcggcgggcatcattacgtgaccaaacctgcgcatcgtttgctcgcgcaaacacttcgagaagccagccattcgaattctgataagggccggaaaaaggccacgcaattaggttatagcggggactgtggaagagattgagtttgatagcgctatgtaagagcgtttgtaatgccgtcgcgatatctgaacgcgggcgcaaaacggcaatgctctgattcaccaggtcatcagccagaaactcatacagaccttgtatatagagcgctgattcagcggttccgcaagtattcagattatggtaaacccgccagtctccgtttggctggcgcatggcatagccagcatgtgaccaggttaaatgtcggctcgacatatcttgcccctggcgaaccagaatgacgaccggatcgggttgactgttaagctgttgtttgagctgtagcgcctgatccattgtcgctgcgatgctctccggcgtgtttgctttttggtgacagttagcactgtctgcataagcgttgagcgagattgcgctgagccacagggcaaacgcgaaccgcttcatttggccggtaccgtctggttgctggaaagtcctgcgtcgtcctgatttaccatatgggcaaggactttgccctcttttttcaaataagcgccggtgccttcctgcgttttttccagagtgactttatcacctgctttgaggttgccttctttgacgacatgtagcggaacttgcattttaatgtctttgttatcgggggacttagtggttaacagcgcggttttttgctttttattttcgacaacagatccaatgctcaggttgagcggcagcagtacgggggagagtataattccgctaaccagtgcggaactgcccacgctgacaaccgcagacgatgccgcataccagccagtggcagacatttcttcgctatagctggcgtgggaaaatgagaaacagatgaccgcggcggcgaatgtcattttattcatattgattccttttaatatgcgttttaagtacccatagaaataacactaaaatacttcccggcaaccacacccacagcaattctgagagaatgacctggtgtccatacggcgtgatgtagcttgaaagcgcgaacggcgcgactttaatcacctgccagggcgcaaaaaaacgttcatctgaccacggccacagccagccaacgcctttcccacccgtggttatcgaatccagcaggctgtgcgacaacaatgaaacggttaaaaacagccagcagcgcacctgcccagctcgaaaccatcgtcgtcccgcgagtacgcacaacagggggaggacgaatgcgaaaagtaaagagtgggtaaatccgcgatggccaaatacgttgccgtaggcgacgccaaatttaaaggccagcacgtcggcatcggggagcatcgccagcacaacaccggcaaacagcaggcgaggagggataactttcaggcctaagcctgcgccaaaacacaggggaacggcggcgtgggtgataacggtaggcatagcgatcgttcacagggaaatagccatgctagcagttggaacgcagaggattaagtggatgattatctgaaaagacagcgtaatcaggccggataagacgctttgcgtcgctatccggcactctgtatcaggccacgacgttcacactttggccttcaaagctaacggtttgcccggcgacaattttgcagcgtttacgcgtttcaaccgcgccatcaaccttcaccaacccgtcggcaatggcgattttcgcctgcgcgccgctttcgctccagccttccagcttgagcagatcgcacagctcgacgtgcgggtgcttgcctaaagagaatgtcgccatattattttccttgtggatcgtgatattcaatgcacgcctgcagcgtgttttcgataagcgtggcgaccgtcatcgggccgacgccgcccggtactggcgtgatgtatgacgcgcgcgccgcggcttcgtcaaacacgacgtcgccaacgaccttgccattttccagacggttaataccgacatcaatcacaattgcgccttctttaatccattcgccgggaataaagcccggtttacctacggcgacaatgagcaaatcagcatgctcgacatggtgacgcagatctttggtaaagcggtgcgtaacggtagtcgtacagccagccagcaacagctccatgctcattgggcgtccaacgatattggacgcgccaatgaccaccgcattcaggccgtaggtatcaatattgtaacgctcaagcagcgtcacaataccgcggggcgtacagggacgcaggcgtggcgcacgctgacacagacgaccgacattataaggatggaaaccgtctacgtctttatctggcgcgatacgctccagcactttaacgttgtcgatacctgccggtaaaggcaactgcaccagaataccgtcaatcgtgttatctgcattcagagtatcgataagcgccagcagttcggcttcgctggtggtttctggcaggtcataggagcgggagacgaaccccacttcgtcgcacgctttacgtttgcttgcgacataaatctgtgaggccggattgctgccgaccaacaccacagccaggccgggagcgcgaagacctgctgcgacgcgtgcctgaactttttgagcaacctcagatcgcacctgctgcgcaatcgttttaccgtcaataatctttgctgccatcagagagaagattccatctgttacttcaagtcaaaggggatgacgctattttgtcagaagcgggcctcgctgtcagttaacgtttgtgtttccgatgcaaacgcgacgtctcccccgtctgttgacgatactgagacgtggcccgtaagcgcgccatgattaaccaaaaagaaacaattcatcaccctggctatggttaccgtaatccctcgtcgttaatagcatcgggcggcataatgcgacattttatacaaaataagattagacccttcttatatcccaataagaattagcttaggtcattaaaagagtttgcggctattttttatttagcgaaatgtttaatttattaccgtgacgaaatgtcatattcgcaaagattaattactgcgtctgatactcaggggagaaacagaaaactaattaatctgcgatatctatctttacaggatgcagagataacttttctgacatgctatgtcgataataattcaaacggagccgacaggatgccgaaaccgggtgtgtgtaattcaagggaaatccatgaaacataaattaatgacctctactattgcgagtctgatgtttgtcgctggcgcagcggttgcggctgatcctactccggtgagcgtgagtggcggtactattcatttcgaaggtaaactggttaatgcagcctgtgccgtcagcactaaatccgccgatcaaacggtgacgctgggtcaataccgtaccgccagctttacggcgattggtaatacgactgcgcaggtgcctttctccatcgtcctgaatgactgcgatccgaaagtggcggccaacgctgccgtggctttctctggtcaggcagataacaccaaccctaatttgctggctgtctcctctgcggacaatagcactaccgcaaccggcgtcgggattgagattcttgataatacctcttcaccgttgaagccggacggcgcgaccttctcggcgaagcagtcgctggttgaaggcaccaatacgctgcgttttaccgcacgctataaggcaaccgccgccgccacgacgccaggccaggctaatgccgacgccacctttatcatgaaatacgaataatcccgtcagggaacgccagggaagggaggcgcctcaacggaagaggctatcggggataaatagagaacatagcagatgataaggaaaggcgcggcgctagcggggcttgttttgatgtcgcccgtcattgcgcagccggtaatggtggagagcgggcgtgttcacctgcgcggacaactggtcaatggcggctgcgctgtcgccacagaaagccagaatttgcgcgtattgatgggacagtaccgcacgaatgcgtttaccggtcctggcagcttcgctcccgtcagcgttccattttcgttacggttaatctcctgtagcgcggaggtctggcgtcatgtcggcattgcgtttgccggcgttacgcctgcggaagatccccatgtttttctggccagcggcgagggtatcggtaatgccggaatcggcctggcattatttgatgaccagcagcggcaaatcatacctaacacgttaccgcttcattacacgcccattttaacgtcagaaatgactttgcattttactgcccgctatcgggcaatttcagaaaatatgacgccgggacgaattcattcagaagtgtggtttacgctggtttacccatgaattttcttgccgacgtgactcaatgcaaaaggtattttttaccatgctgaatagtataaaagtaggctttattgttcttctcacgttatttacttcgctgaacgtacaggcggcgggggggattgcattaggcgccacgcgcgttatttatccctcggcggcgaagcagacttctctggcaatcagtaatagcgatactcaagaacgttacctcgtcaattcatggatcgaaaataacgctgggcagaaagaaaaaacgtttatcgttacgccgcctttattcgtcagcgagcccaaaagtgaaaacacgctgcgtattatctacgccgggcaaccgctacccggggatcgggagtcgttattctggatgaacgtgaaagccatcccgtcggtcgataaaagtcatattgaaggaaaaaacgttctgcaactggcgattctgtcgcgcatcaaactgttcgtgcgtccggcgaatttgccgcagacgccggaagacgcgccgaccttgctgaaattttcccgtgtcggcaaccatctcaagataaccaacccatctgcttattacctcacgctggtcaatatcagcgtgggcgcgaaaaagattgataacgtgatgatcgcgccaaaaagcgacatgcaaattcccttaccgactggcgcgcagggcaacgtgacatttcagtccgtcaatgattacggcgcattgacgtcggcgacaacggccagtctcggttaagcagagagcgtgaagccacacgagaacacgatgaagaagacaacctggtttgcagggcgatttcccggctatgtatcaccgttaagcagcgtggcgctgtcggtgctggcggcgctgtgtccgctgacgagccgcggcgaaagttatttcaaccctgcgtttttgtcggcggataccgcgtccgtggcggatttatctcgctttgaaaaaggtaatcatcagcctcccggtatttaccgggtggatatctggcgtaacgacgaattcgtagcgacgcaggatattcgttttgaggcgggcgccgtgggcaccggcgataaatccggcggcctgatgccttgttttacaccggagtggattaaacggctgggcgtgaataccgcggcgttccctgtctcagataaaggcgtcgataccacgtgtattcaccttcctgagaaaatcccgggcgcggaggtcgcgttcgatttcgcgtcgatgcgcttaaacattagcttgccgcaggcgtcattgctcaacagcgcgcgtggctatatcccgccggaagagtgggatgaagggatacccgccgcactcattaattacagttttaccggtagccgcggaacagacagcgatagctattttttgagtctgctgagtggcttgaactatggcccctggcggttgcgtaataacggagcctggaactattcgaaaggggacggctatcattcgcaacgctggaacaacattggcacctgggtacagcgcgccatcattccgctaaaaagcgaactggtcatgggggacagcaataccgggaacgatgttttcgacagcgtcggctttcgcggagcgcggctgtactcttctgacaatatgtatcccgatagcctgcagggctacgcccccacggttagaggaatcgcccggacggcggcaaagctgacgatacgacagaacgggtatgttatctaccaaagctatgtgtcgccgggcgcgtttgcgattaccgatcttaatcctacctcttccagcggcgaccttgaggtgacggtagatgaaaaagacggtagccaacaacgttacacggtgccttactctaccgttccgctattgcagcgtgagggcagggtgaagtatgacctggtggccggggattttcgcagcggcaatagtcagcagtcttcgccattctttttccagggaacggtgattgccggcctgcctgcggggctgacggcttacggcggtacgcaacttgccgatcgttaccgtgccgtggtggtcggggcggggcgaaatttgggcgactggggagccgtgtcggttgatgtcacacatgcgcgtagccaactggcagatgacagcacccatcaggggcaatcgttgcgttttctgtacgccaaatcgctgaataattacgggactaattttcaattgctgggttaccgctattccacgcgcggattttacaccctggatgatgtggcatatcgcagtatggaagggtacgactacgaatacgatagcgacggacgccgccataaagtgccggtggcgcagagctaccacaatctccgctacagcaaaaaaggccgctttcaggtcaatatttcgcaaaatctgggggattacgggtcactgtatctttccggcagtcaacaaaattactggaatacggcggataccaatacctggtatcaactgggatacgccagtggatggcaaggcataagttattcgctgtcatggtcgtggagcgagtcggtggggagctcaggcgccgaccgcattctggcattcaatatgtccgttccgtttagcgttctgaccggacggcgttatgcgcgcgacactattcttgatcgtacttatgccacgtttaacgccaaccgcaaccgcgacggcgacaatagctggcagaccggcgtgggcggcacacttctggaaggacgtaatctgagctacagcgtgacgcaagggcgtagcagtagcaatggttatagcggcagcgccagcgctagctggcaggcgacgtatggcacgctgggcgtgggatataactacgatcgcgatcagcatgactataactggcaactttccggcggcgtggtcggtcatgcggatggtattacgtttagccaaccgttgggcgataccaatgtcttgattaaagcgccgggagcgaaaggcgtgcgcatcgaaaaccagaccggcgtgaaaacggactggcggggctatgcggtaatgccctacgccacggtatatcgctataaccgcgtcgcgttagataccaacacgatggacaaccataccgatgtcgaaaataacgtcagcagcgtagtgccgacagagggcgcgctggtgcgggccgcttttgatacgcggataggcgtaagggcaatcattaccgcgaggcttggcggacgtccgttaccgtttggcgcgatagtacgagaaaccgccagcggcattaccagtatggtcggcgatgatgggcaaatttatctgagcggcttgccgctaaaaggtgaactgttcatccagtggggagaggggaaaaacgcgcgttgtatcgccccttacgccctggcggaggatagcctgaagcaggcgattacgatagccagcgcaacctgtatccgtccggcgtcataaaaggaaaaatagagatgaaaatatactcagcgctattgctggcggggaccgcgctctttttcacccatcccgcgctggcgacggtttgccgtaattcaaacgggacggcgaccgatatcttttacgacctgtcagatgttttcaccagcggcaataatcagccgggacaggtggtgacgctgccggaaaaatcaggttgggtcggcgtaaacgcgacgtgcccggcggggacaacggtgaattatacctaccgaagctatgtatcagaattaccggtacaaagtaccgaaggaaattttaaatacctcaagttgaatgactaccttctgggcgcgatgagcatcaccgatagtgtcgctggcgtattttatccgccccgtaactatattctcatgggcgtcgactataacgtgtcgcagcaaaagccgtttggcgtgcaggactcaaagctggtttttaaattaaaagtgatacggccttttattaatatggtgacgatccctcgccagacaatgtttaccgtctatgtgacgacctctaccggcgacgcgttgagcacgccggtatataccattagctacagcggcaaagtggaagtgccgcaaaactgtgaagtgaatgccggacaggtcgtggagtttgatttcggcgatatcggcgcgtcgttatttagtcaggcgggggcgggtaatcgtccgcaaggcgtcacgccgcaaacgaaaaccattgctatcaaatgtaccaacgtcgcggcgcaggcctatttatcgatgcggcttgaagccgaaaaggcctcagggcaggcgatggtgtccgataatccggatttaggctttgtggttgctaatagcaacggtacgccgcttacacccaataatttgtcgagtaaaattccgtttcatcttgatgataacgccgccgctcgcgtaggtattcgcgcctggccaatcagcgtgacggggattaaaccggcggaagggccgtttactgcgcgcggctatctacgagtcgattatgattaaggaggcataatgatccttcggcgcgttttcatcgctatcggttgtgttttgttcagcccgctgagtcaggccaactcatctctgggcgaagtgaatattgaactgcgcggtaacgtggtggattttacctgcgccgtggtggcgggcgacagtaacaagtcggttaacctcggcacctggccgacaaaacagcttcacgccgccggtgacgctacgcaaccggtagcctttagcctaaaacttgaaggttgcccgccggggtcggcgtctataacgttttccgggacgccagcgcccggcacggcattactggcgcttgctgatacggcaatggcgcaaaaactggcgattgaaattcgcgatggcgatcaacgtcgattgccacttgaacaggccagcaaggccgtcgatattgacaacaacggcaatgctaccctgaaattctatgcgaactatatcgccttagccgatggcgtgcagcccggacttgctaacgcggatgcgaccttcctgatcaattacaattagtgtccgttattgtggctcccgaacgataattcgccgggagtacatttacaataattcgtgtgatttggcgtaatcgataagctcaacgatagagtgaaggccaagtttagaaaatatattggccttatgcgcgctgatagtcttgttactcaataaaagttgctcggcaatttctttgttagacattccattggccagatagcgcagcacggtaacttcgcggttagatagtggcatatcatggtgcccgcctttgggggtacgggtattactgatgaaattaagcgtctcagatgggaaaaaagaatagccggataaaatcatttttaccgcattataaatatcattgaggtctttgcgtttacttacaaatccgtttgcgcccgctcttattgctcttccggcataaaaagcctctgatttcgacgataaaaaaagtatccgggtatgttcctggatagatttgattcgtttaagtaaggtaaagccgtcggtgcccggtaattcaatatccagaatgacaaggtcaacaggataagtgcgcagatactctatcgctgttcggctatcatccgttttcaggacaacctgaatattgctatttttaccgagtaaaacttcgatcgacattcttacaatagggtgttcgtccataatgataacagatgcaggtttcattgttgtatgcctcagactgttatgcgtccttcgttttataataagcgtcagacaccttaaagattgtgaaatagccagatctacacaccacacagtggagcaataataaagaatgagacctccctgttgactggctattttgcgtaagagtaataaatatgtggaatatccatttcgcaccaacaaaaaagaaatttctgattaagtaaaaacaatatggattatacctggtctgatttctcggaaaagtcttgcgaaatgcgaattatggatagcgggtaggatattctgtgacgttatagaaaatttgttcgtggtggagctattttctttagagttgacattgagtagtttaaactgttgtttttaagtataaaaataatatgaaagactaattgtttagtatttgttatgtaataacagaaagatgttgacgctggagacctcgaaaaacgaggaggaacaggggacgatgtaagaaaaaaatttttatcgcttaccaggacgagttgtaaatattaattttatgtgaaatatttacatttaatggaagtgaaaataagtaatttcttaaaaaatcttattcaccaaaacgttacttcgttaaaaaatgtcgtggaaagtaacgtttagctgctggatcagccgaagaaagctttgcctgtggggaaggttaaggagggtgataagttgtttaagccggtaaactacacgatgataaggtacgctttgctgacgtgctatttcttttaaagaggcgccttgcgctaaagtttcaatcatcaaccagtcagtacggctaaagctttccgataagcgaggtttggaggctgataacaaggcttcgcgtactgaggccagattttgtcgtcgcgacaggacaaaaaaacgcccagccatacggataaactgtgttatagcggaggttttatctgataccagcaggtaaatctggatatcgctttgttgccaactgagcgcgcgtagctggttaagcgcctcaatacaggagacaggtagcgcctccatatctacaatcagttgtctgagcgaccccttttcaatccacaaagaaatgtcatctaatgagcggaatgctgcggtacgttttccggaaaataagtagtgactcaatgaatagccgaggtagttgtcagttgtaattattgcctgagaaatgataccaaccggcaaggcataattgagctgttggttcagtaactcaaggcgatcaaatatctgcggcgttggagagtgataacggcaggcgcagtctttagcatttcttaaacggcggtgtctttccctgcgtggtacgctgcgcatcctgctttttccattgctctaatatatatctggtaatatggctggccataaataaccttgttccatcgttgcaccagcgtaaaaagcaatgcttcgttgctctgatgtttcaatgccttccatcagcattaactgctgaaaaaaaacttcgctatcatgttctgacggaagttgcgtcaggacctcatagccgattaattgcgcagttgagagattaacgattggctcagattttaacaattcgctgttgagatatgaatgacgtgtgggcgaagacgccaggtgtgggggatttatcctttcctttaacaaaataccctgtgccaccaaacactcctccaggcatttatgatgcagccatatattttcgacccctgaatctatcaggatattatgggcatcattgtggcagcgttaaaaaaatgcctgtaggtatcgttacttaattattggtgagatatttcgtaagccttgtaaaaagttaagtgagtttacttactgagtaagaaatgaaggttaactctaatatattttaaaaactgctgctccgttttaacatgtaattttcgcataatgctccggcggagtgactttgtctgctcttcagaaagtgaaagtaaagcggccgtttcgcttaaatgataaccgctggcgatcagttttaacaggtgacgttctgttactgaaaaatgacgagtcgtgcagtagtggcaaatgccagaagggacgctatgtcgaagcgctcgtttatgtaagatcaatatcattttccgggtaatttcttcaacatcatcttcccgataaatatgcggcagcatatacagacatggtctgaacatgagcttttctttatcgcatttattacaaataatcgcccgtagctgatgttgggtatgcataggtatctgataacagccagcgctgaaccaatcatcatccagggccaggaaagcgatatcggcattatctatctcttctggcggcagaaagtcaattttctgctgccattgattcgccagacgcgtcatgatgattttcaacccatgctcaaagtgactgttttgttccttaatagcgatacgcagcataaaaaaatatcctacacggcaggtgaatcatggtgaaatattaaagaaactgattgattttctaaatactggcggccttaattcccactttatgcgtgctgagatgtgtccaggcgatttcctggaacctggcattgcgccagaaaagacgatattcgtacacttagtcagcaaccagaacaaaagccattgactcaggagtgcctgaccgtataattctcgcgtttcgtctacacgaagtcttcacttcacaaggcgcccttagctcagttggatagagcaacggccttctaagccgtgggtcgcaggttcgaatcctgcagggcgcgccacttataaatcaacgtgttacgcttctttatttcctccttattttccatatgggacatatttgggacatcatcaccaaaaatgtcgtctattttcctcgcgtgttccgttaaatgattaggtgcaaggtgagcatatctgtgaatcaccacggataacctggacacttctgagtcgttgatgatataggttttcatattcagccggtggcatctgctcgctcgaaccatgccggcgtctactgttataaaacatttctatgtaatcaaaaatatcgcttctggcttcgtctctcgttccgtagatcttttcctttatccgttcacgcttcagtagctggaaaaagctttctgcaaccgcattgtcatgacagttgccacgacggctcattctgctctccagtccgtgcggtttcaggagcgactgccattcatagcgggtgattacgtcgccacacggccatcagaagcgcattcaggactctatcttttgtcattcatggttgcagtgaccaattgaatctattgcggcttttttttatatgtcccgctcgtcagtaacccgcttcaactctttcgggagtcggcggattccggtctgatcatctgactgctctttatttctttattggtggaggagttcgacccgtacttctttatcctggcgtaaagactgtgggtagtaatatcgagatgtgttgcggcgctggaaacagaatggccacgctcaacgacctgtcttaccgcttcaattttaaactcttcgggataacgtttaccgctcataggcacctctctttaagtcatcttaaatggctctgaggtgtctgttaaacctgtggcgattcacattgaccgcagattgtcaggttcctttacccggtagtgaaaccagtagggggcagtttatccgcactaaaagacggtgttcctgcatctgtggtggagttgaaccggatgggctttgggcacatgcgtatccttgcgtgtattggtcagttgccggagtctggattaatgcactatggctccgttgggttcttttttgggactgatggtgcattgcgacttcttgctaagaaacctgatggggcatttgtgacatacgatatgtaggaatccccgccgcccgttacccattggtggcggggaacattaattatacatgaatgttatttaattatttccgtaatattctcatttgtcctcgcccctgttctaacgtcccatgtcccagatgtaattgattctaattcatttgaatctatgccgttaatcgcccgcccggaaagccatcttccgtctatttggaatgtcttcttgtcgacatctgcatttataatttttccatcctttgttttaaagctaatgaacatcgctgtattctcatcaagagaatcagcaggatttttattaaactcaaatattacaaaggttttaatgcccatttgctgtttatatatccataatgattttatataaacgttgttacatatttttgcgttaatattaagaggcttgaaattaaaggctcgtgaatagtcgaaaaatcctggagcagttattttcaaatcaatcccgtagtatctagacattgcttcactgttaaacgtatcaagacttgggcctgcatgcagtaccggtggaaagtaataatcaggaattatcgcttgatcttgtttgttatgtttcgccctgtctattatttcttccctaatctccgtttgtttgcttattgatttaattgatgagtaatagaggatgtatgatgggatgaaatataaaaaagccattgcatatgtagtaacagataaataaatggaagccttgttaaatttcgtaaatgcagaatgagcaacaaaggaaatcgaaagaatcataaagcagagtgctccattgagagccctgctgggcattgcaggagatgcaaggaacgcaacatttgcagcaattgcacccagcatgaataaaaagcttccaaacataagtttgctgctactattccttgataacactacagagattagtagtattataaatgcaatatagacctgccaatatgcccccattgctgatggcagcctttctgaaaagtgctcaagaaccctccatgcaagtggttgattgtaccagtcttgtattgtagacgcacgggataggtttcccggagccagcaggagaacccccgcgcctattgcagatccgaatacgccaatcagtaaatatttatttctattcattataaagaaatatgctacagaaattaatacaactacaagagatgtattttcatttgagcaacctgcaaatatcgatgatatggcatatacaaagagtattaaattggattttttaccattgcttaaatatatagaaattagtatataaatggcaatgaacatgttggtccataagtaatttgctgacccaacaagccagaagttagtttgaccgagggctggatttgcaacgaagtataagaaaaataagaaaatcatcacatatggggacggtgacgactttgttaatgtagctgggatcattgtccagcacaacaccattaatgttagcgctgctgagtttattgcattgtaaatatgcggggagaaaaactttaatagagatgtgctgatcgtatctgacacaacccttccgctccatcccaaatagtgcatttttacgctagaaagcgaaagctctcttagggcataagtatagtcatcagagttcattggtgtgataaatcctattgaatacaccaacgagaaaactataaggatagcgattaccatttttaatctattgttaaccatttttcttctcattcttaattatgtacttaggccttttttttgtttctatgtaaatcctgccaatatattccccaagaatacctattcctatcaattgaacgccacccagaaaaagtacagaaacaagaagagacgggtagccaggaacattatttccaaatattaatttatcaataatcatccatgcaccgtaaaggaatgacatacctgcaataaacaatccaatgtaagtccatatgcggagcggaaatgttgagaaagaagttattccttccagcgccagattccataatttccagccattgaattttgaatcgccggcaacacgctcagcgcgggcgtattcaactacatcagtcttgccgcccacccatgacagaacgcctttcataaacagattacgttctggcatctgtttaatattttcgacaacctcacgactcattaaccgaaagtcgccaacgttctcttcaattttcggattgctgattttattatgcagcttataaaaccattcagctgtcttacgcttcatgcgcccgtcagttgagcggtctgagcgcttagccagcaccatatccgcgccagcctgccacttctcaatgagatgggggattacttctatcggatcctgtaaatcgacatcaataggaatgaccgcatccccggttgcatggtcgagacccgcgaaaagagcaggttctttaccgaagtttcgcgtaaacgaaagcggaataacgagcggatcagatgcagctattttgttaattattgattcagtcgcatctttgcttccatcgttgatgaaaacaatctcaacttcatacggttttagctcttcaaactcgcgaaccgttttatagaaaataggtatcgtggcttcttcattgaagaccggaacgactaacgagattttcatttcgcatccctaaagacaatgaactttgaataaatgaatccgcatatcaggctgatagctgaaaaggtgacaagagtaaggagtggcggcagggaacatttgtcagccatccagccaacaacggcgctcagtgttcccataaatcccacgtacatcatgtagcgaagcgtggtggtgctggcgttaaaggtgaagcgcgcattggcatagaagctgaacgatacggcgataacaaaaccggaaaagttcgccaacgcctgatgcgtatgcatcccatacacacaaaaagcaaatacgccccaatgaataagcgtgttaagaacaccgatcgatgtgtacttagcgaataacttcaacattatgaaaatcagcggattcggaaaggtctggagtgtagcactacaaattgctttgatcgatataaacgatcaataatgtggtattcaatagtttaaagttattgttatcttattaattgatcgttgttaccgatcaattggggctactgattgctaagtagtttgggacaaaaacgggacacacaaagctttgcatcggcttgcaaggctttgcatgtttttcgaagatggggcgagtgagcgccgtagtaatgggataacttgttgttagctcaggtagttccaggaacatctaagccgtgggtcgcaggttcgaatcctgcacggcgcgccatttaacctctcaaaattacgttaatccgtaagcttctgcggcggcgacgttgcgccatccgcagtacgtgacgctaatatgcaaataactaattgcgtttaatctgtttatggtgctcctcagcctggatctcgtgggagaaagaatgggcattattcatcgattaatggatgaccattgctttttcatagtcgtccatttcagaaaaggatgtcgcattttccacagtagccggggcgctgggtttctgtgtctgagccatttgctgatgcgcgaaggcgtcaccgttattcatcatctcatgtgctgtggcggataattggcgggattccattttctctgcggtgtttacgccagctgaaataaaaaaacgacagctaaaagggatgtaaacttattcatcttatttctccggtgtgggttaataagagaaataataaaacagttgttgggcctggcgcgtgacgggataatgacgattatatcagattattttgctggctagtgatagcgcctttcactatcgctacagttcaacggaggtgtttggggaatgtcaaaataaaacgagtagcgcgtgtatcggaggtgacagaaatttttccccggtgcgcagtgacgatggattttacaattgccaggcctataccgctgccttcccctttacgctggcgggagggatcaacgcgataaaaacgatcgaaaaggagcggcaaatgttccggcgcgattggcgtaccggggttttcaacaataatatgtatctggtcgtccgcttcttttatccgaagagtaatggttttacccggcggcgtatagcgcatcgtattagagagtaaattactgatcgctctgcgcagcatgatgggatcgccggtgattcagcaggcgcggccttcaaagcgcaagctcccaacaccttttcggcagaaaaactcgatgaggcgctttaccacggggcggtgctccgggtgcggccaaaagccatgacggtagcggtgattatcgccggtctgctacctgttttatgggggaccggcgcgggttctgaggtgatgagccgtattaccgcgccattgctgtcgctgttcatcattccggcagcctacaagctgatgtggctgcgcaggcatcgtcgccttgcggcataacgtgtgcaccccgcctgcggcgtcaaactgcaggcgggttcagcgtacgtttatcgtccgagcgcgctgacccgtttgcggtactcgcctggtgtacaaccgaattcacggacaaaagctttgtgaaaagaagattcgctcgcataacctaccgactcggcaatcaccatcaccggcagcacttcacgcgacagggtctgggcggcgatttgcaggcgcagcgttgttaacacggctaagggcgttgtagcggacacgtcgcgaaatagctgggcgaagctcgcccgcgacatgtgtacccgttgcgccagcgtttcgaccgtccagggatgcgccggtgtttccagcatgtgaaggatcacgcggcccagccggggatgcagtaataaattgagcacgcttttcgccgtgccagcctgcgatagccagtcgcgaacggcgagggtaaacagcgtggcgcactgctgactgtataagacatcagcgccaggtaaatggcgttctgactcctgctgtaacagcaaaatggtggcgttaatccagatactggcggggctatgcggcggcggggcaagacataacacttccggcaacgcggtaaggaaataacgtgacgtcgtgtgcagacgtagactaccgcagacgatatgtgtcggtgattcgccagactggcgcaaacggtgggcggagttttgcggcagaatcaccacctttcccggcgtaagcgtcatggcgtcgccggtaggcatttccagttgcgcttcgccctgcgtaacggtatgccagcgaatcaccgatagttcgccagcggcgtgcggcaactgccagtcgccgcctaacgggcaattcttgtcgattgagccctgaggggcgttaagcgtcaatagccgactaagcgcatccatatagactccagaacagatttattttcaaaactagagataaccatttctgtatctgttcactatatttcggactcaatgtcatttctacccttgtttttgctaaccaccaatttagacgataagacaaaaaatggcgcgttgcggataaccctgtcttttttgacgttatttatacttgtcctgacaaacagatggtgatttggcggagaaagaagatgacacagtatcaggcgctcattattggttttggcaaggcaggaaaaacgttggcggcaactctggcgaagacgggatggcgcgtggcgattatcgaacagtccgccagtatgttcggcggaacctgcatcaacattggctgtattccaacgaaaacgctggtgcatgatgcggaacgtgagggcgatttttctgtcgccatgcaacgtaaagcggcggtcgtaaattttttacgcgacaaaaattttcataatcttgccgacctggacaatgtcgatgtgattgagggaagggcggagtttattgataaccataccttacgggtatttcaggcggacggcgagcgggtgttacggggagaaaagatctttattaatactggcgcagagtcggtgatcccggctattacgggcttaacaacgacggcaggggtgttcgatagcaccgggctactcagcctgagccagcgtccggcgcggctggggattttaggcggtggttatattggccttgaatttgcctcaatgttcgccaactttggtacgaaggtcactatctttgaagcagcgccgcaattcctgcctcgtgaagatcgggatatcgcgcaggcaattacccgtattttacaggaaaagggcgtcgagctgattttaaacgccaacgtacaggccgtatcctcaaaggagggcgcggtacaagtagaaacgccggaaggcgcgcatcttgtggatgccctgctggtggcgtcggggcgaaaaccggcgacggctggcttacagttgcagaacgccggcgtggcggtgaacgaacgcggcgggattatcgtggatgattacctgcgtaccacggcggacaatatctgggcgatgggcgacgttaccggtgggttgcagtttacctatatttcactggatgattttcgtattgtacgcgacgggttattgggagatggcaaacgcagtacccgcgatcgccagaatgttccgtattccgtctttatgacgccgccgctctctcgtgtcgggctgacggaagaacaagcgcgggcaagcggcgcaacggtgcaggtggtgacattaccggtggcggcgatccctcgcgcccgtgttatgaacgatactcgtggcgtactaaaagcggtagtggacgtgaatacgcagcgtattgtaggggtgtcattgttatgcgtcgattctcatgaaatgattaatatcgttaaaaccgttatggatgcagatttaccttatacggtgttacgcgaccagatatttacccatcctacaatgagtgagtctttaaacgatctcttctctctcattaagtaaaacataaataatatagccctgttaatcagggcttttttttgcctgtcagaccataaaaatacgccaggacaaatatgctggcgtctgaaagaaaaggctttagtcaggcataacgtattataacaccattgaaataacccacgactggaaatctcgatgttaaaagttaccacacttattgcttcattattggctgcgccgctggcgttttccgcttccgcccagccgctaaccgacgttgaatatatcagcgtttctgcggtgtcagcaacgccgtcaatgcttgaagatgctattgccagactggcgcaaagtaaacaggcgtcgtcatggaaaattacgtcaatgcgtattgataatacgggttacgccactgcgatattatataaataaggagagtctgagatggataaatatcttcgtctgttaagtcagggggatcggctggggttaacattaattcgcctgagtatcgccatcgtttttatctggattggactactaaaatttgtgccctatgaggcagacagtattaccccgtttgtggcgaacagcccgtttatgtcttttttctatgaacatccggaagaatatcgtcagcatctgactcatgagggcgaactaaaaccggaggaacgcgcctggcaaaccgccaataatacgtatgcgttttcggatggtctgggcgtggtggaattgattatcgcggcgctggtactggctaaccctgtcagccgttggttagggctggcgggcggcgtgctggcattcctgacgccatttgtcacgctgtcgtttttaatcaccacgccggaggtctgggttatgccgctgggcgatgcgcattatggttttccgtatttatcgggcgccgggcggctggtattaaaagatacgttaatgctggcaggtgcggtgatgatcatggcggactccgcccgttcgttacttttacagcgacagtagcgaccctcttaccctctttatgccgcgattcgtcgggtggcgcttgcgccatccgacaatgtgttgatgaatgatggactaccctgacagaagttcctgttccacctgttgaacctgcgcctccagcgtattgcgaatttcggttagcgcccgttcctgctcggagaaataggcttccttatccgcaacggaagaggcgagccgccaggcattttccgtttccagttgcgttatctctttcaacagcgcgtcgatttgcgtgcggagctggcgtattttatggcgcagatgttccaggttattgagcctgtcgcttgccatcatcggttccagaccgctttgcaactgtgtcagtaacgcgcgaattgccgccagatcggcattctgccgcgcctgattaagctgtaccatcatctggtgcgctttttcttttaattcatcggcgaccacatccgggtgacacaggcggctggcctgacgccacaaacgttttaattcactgcgttcgtctgccgacaaacgttgatcgcgggcgtagcggaattgcgcttcctgctgctgctcccgatactggtgatagtcctgttccgcattttcctgcgcctggcggaatgcgctgtcgtcctgatgggaaaaatccgcttccagctcgcgaatttccgccagcaacgcggtgattaactccgtctgctgctggattcgctgacggatgcccaccgcttcgcgcgaggcggcattcaatcctgtccactgctgttttagcgttgccagttgatccacggcctgggaaataaattgcaggcaggattgataatccttttcccggcgttttatttcggcttcttgcttacgctgcatactcaccgcgagctgtttacgcaactccagaatacggctcatcaacggcccgagacgcagatgatagaggtcgttgaaatcgtcgaggatttgtacccgcgcatttcgtttgtcaatcagatcgcgaagttgggcttcaagcgctttcagctccagtttactggcggcaatagagggatcttgccacgtcgagagcgcccgttgagcctgtagccaggcggcgatctcttgcatggcgtcactgaatcgacgagcttcaatcgcctgggcaatcgcgctgattacggcatcctgcggctcatttttcaggtagatgagctgctgacggataatctcttcgtcctcaagttcgatggcgcttttgatgatctctaaacgtttgatgatcttattcatgacgttgatgcctggcgtggctcaaaaacggataacagataccaggtctgattcacctttttgaaaatactgaaaaaatactaaatgtattctgtagggtgtcgtacttttcgtccagagttattcacatattttatacccggcgtctgtcacccgtaacgttctatatcggcgcgcactcttttctttttactccccacgacatctttttttacacgataacgttaacgtccggagttgagccttgacaaacgattgcgccttgcggcagcgagagcgaaatgttaaaaggtgcccctcaataaaaacgatacaggggtaggacgtgaaaaacgcgtcaactgcatccggcgccagcgtgtcggatgccgcgtcgaagaatgaaccgacgcttcaacgggggttgcaaaaccgccatattcagctaatcgccctgggcggcgccattggcaccggactgtttctgggcatcggcccggcgattcaaatggcggggccggctgttttgttgggctatggcgttgccgggattatcgcttttctcattatgcgccagttgggtgaaatggtcgtggaagagccggtttccggatcgtttgcccacttcgcctggaaatattgggggccgtttgcgggctttttgtcgggctggaactattgggtcatgtttgtgctggtcgggatggcggagctgaccgcggcgggcatctatatgcagtactggctgcctgacgtaccaacatgggtatgggcggcggcgttttttattatcattaatgccgtgaatctggtgaacgttcgtctgtatggcgaaacggaattctggttcgcgctgattaaagtgctggcgattatcggcatgataggttttggtctgtggctgctgttctccggccacggcggcgaacatgccagcattgataacctctggcgttataacggtttcttcgctaccggttggcatggtttgcttctgtcgctggcggtgattatgttttcttttggcggactggagctgatcggcattactgcggcggaagcgcgcgatccacaaaaaagcattccgaaagcggtgaatcaggtggtataccgtattttgctgttctacatcggttcgctggtggtgttgctggcgctctatccgtgggtagaggtgaaatccaatagcagcccttttgtgatgatcttccataacctggacagtaatgtggtggcttcggcgctgaatttcgttattctggtcgcgtcgctttcggtgtataacagcggcgtttattcgaatagccgaatgctgttcggcctgtccgtacaaggcaatgcgccgaaatttttaacccgcgtcagccatcgcggcgtaccggtgaactcgctgatactttccggagcgattacctcgctggtggtgctgatcaactatctgttgccgcaaaaagcgtttagcctgttgatggcgctggttgtcgcgacgctattgctaaactggataatgatctgtctcgcgcatttacgttttcgcgcggcgatgcgtcgtaaagggcgcgagacgcaatttaaggcgctgttctatcccgccggaaactatttgtgcattgcgtttctggcgctgattctggtgttaatgtgtacgatggacgatatgcgattgtcggcgattttgctgccggtatggattgtattcctgtttatcgcgtttaccgttttgcgccgtaaggctcattaacttttttgcccgatcccatgttcatgcgatcgggcaatccattaatgccgcaatgtccctgacagcgcgcgaatatcgctgccggtcggcgtctgatgaatacgcaagccaaactcttccaccacggcaaaaatatggtcgaaaatatcggcctgaatgctctcatattccagccacacgacggtattggtaaaggcgtagatctctatcggcaaaccatgatcgtcaggcgccagttggcgtaccatcagcgtcatgtctttacggatgcgcggatggtggcgtaaatattcgttcagataggcgcgaaatgtcccgatattggtcatgcggcggtgatttaaggctgattccggcgcatccagttgtttattccattcatcgatttcctgatgacggctggtaaggtacggctttaacagttgcgcggttaacagccgctgtttttcatcatcatccagaaaatggatactggtcgcgtcaatattaatgctgcgtttaatccggcgtccgccggacgcagacatgccgctccagtttttgaatgagtcggaaaccagcgaccaggtgggaatggtggtgatggtattatcccagttgcgtacttttaccgtggttaagccaatatcaatgaccgcgccatctgcgccatatttcggcatttccagccagtcgcccagtttgagcatatcgttggcggaaagctggataccggcaaccaggccaagaatcgggtctttaaagaccagcattaataccgcggccatcgcgcccagcccgctgattaaaattgctggtgactggccaatcagcagtgagatcatcagaatgccgacgataattgcgccgatgagcttaataccctgaaatattccttttagcggtaactgagaggcggcgggccatttttgcgatagattgaaaatcacgtccagcaaggaaaataacgacagcagggcgtaggtcataatccataactgcgcgcaggtcgtcaggatatccgcagcctcactgcctttttgtagccagagcgcggcctgaatattgacaatgatgccttgcagcgtaaaagccagacgatggaataatttattctgggtaataatttgcagccacaggcgggaactggcgctggcacgtttttcgaaagcgcgcagtactatccagtgcaaaataatatgcacgacaactgctgtcagaaaaataataccaaatatcaccaccagcgacgtggtgtgattcatttcaattcccgctaaatcttctacccgggatatcaattcctgcataatctctcctttataaacagcagcctatgatgactgctgaatggcatttatgcaaatcaggacgcctgcgcttcaggcataatcagcaacagacgggtaaaagcgcctctggggttatccatacgctatattttatcctgcgccctgtaaacgtcgttattttacgcggttccctctttttgaacaggcgccagtccgtcaacaatgaatgaaaactttttaaccagaatgtttaaaacgattgcaatatctctgtcggataatgattagcaccgtcgtacctatcaacaataacattaaggaacatcggatgacccaaaagcgtaccctgctaaaatacggcatactctcgctggcgctggccgcgccattatctgcctgtgcgtttgactctcttacggtgattggcgatagccttagcgataccggtaataacggtcgctggacctgggatagtggtcaaaataagctctacgacgaacagttggccgaacgatatgggctggaattaagcccttccagcaatggcggctctaattatgccgccggcggcgcgacggcgaccccggaattaaacccgcaggataataccgcggatcaggtacggcagtggcttgccaaaacggggggaaaagccgaccacaacggtttgtatattcactgggtcggcggaaacgatctggcggcggccatcgcgcaaccaaccatggcacagcaaatagccggtaatagcgccactagcgcggcggcgcaggtagggctgttactggatgccggcgccgggctggtcgtggtgccaaacgtaccggatattagtgcgacgccaatgattctggaggcggtaatcaccgctgggctgggcgcagcggcgcccccggcgctaaaagcggcgttagatgcgctggcggagggcgctacgcccgatttcgccagtcggcaacaggcgatccgcaaggcgctgctggcggcggctgcaacggtaagcagcaatccatttattcagcaactgctcgttgaacaactgctggcgggctatgaagcggcggcagggcaggcgtcagctctgaccgattattataatcagatggaagagaaggggctggagcaacacggcggcaatatagcccgtgccgatatcaacggcctctttaaggaaattcttgccaacccgcaggcgtttggtctgacaaataccgtaggtatggcctgcccgcctggcgtatccgcttcggcgtgctcctcggcaatgcctggatttaatgcgtcgcaggactatctgtttgccgatcatttacatcccggtccgcaggtccataccattattgcgcaatatattcagtcgatcattgccgcgccggtacaggcgacatacctgaaccaaagcgttcagtcgatggcgcaaggcagtcgtaccacgcttgacagccgttatcagcagcttcgccagggggaaaatcctgttggttcgctgggcatgttcggcggatacagcgggggatatcaacgttatgataataatgaggccgacgggaacggtaatcataataatctgacggttggcgtcgattatcagcttaacgagcaggttctgctgggagggctgatagccggttctctggataagcaacatcctgacgataattatcgttatgatgcccgcggttttcaggccgccgtattcagccatttacgcgccggtcaggcgtggctggatagcgatttacactttctgtccgctaaattcagtaacattcagcgcagtataacgctcggtgcgctaagacgggtggaagagggcgaaaccaacggtcggctgtggggcgcgaggttaaccagcggttatgattttgtcatggtgccgtggttaacgaccggaccgatgctgcaatatgcatgggattacagccacgttaatggttatagcgagaagctcaataccagtacatcaatgcgttttggtgaccaaaacgcccattcgcaggtgggtagcgcgggttggcgtctggatcttcgccacagcatcattcactcctgggcgcagattaattatcgccgtcagtttggcgatgatacgtatgtggcgaacggcggccttaaatcgaccgcgctgacgtttagccgcgacggaaaaacgcaggataaaaactgggttgatatcgcgattggcgcagattttccgctgtcggcaacggtgtccgctttcgccgggctgtcgcaaacggcagggttaagcgatggcaatcaaacccgttataacgttgggtttagcgcccgattttgatgacacgccagggagggccaaccccgttcgttcgtgacacgatgagccgaaagcgcaacggtaagttttataaaaagtaagtattttcaaaaatgtgggtgaagcctgtgacgtcgtttgtaaattatcgtataagcggagtttacgtttttggcggggcgcaggtatgaataaagagtccatatttcgtcagttggagctacggctagccggatgttcactaacagctgacgcgttaggcgcgtttagcgcaatggcgattgccgacagtctcaggcaaaaacgcagcattattagtcaccatcttaataacttgcatcgtgagcagcgggtggtcaaagtgaatagccgcccggtgctgttcctgcccgtcgaggcgctacgtcgtcaccaccggctggcggttcggcagggggattacgcgtccattcaggcgctgtgcgcggagcggcaggacagtctggagctgctcattggcgcacagggcagcttgcaggagtccctgcgtcagtgtaaggcggcgatcagttatcccggcgcgggcttgcctttgctgctgcgcggcccgacggggacaggaaaaagttttttggcgcgtcagctttggcagtacgccatcgagcagggcattttgcccccggaggcgccctttaccgtgtttaactgcgccgaatacgctaataacccggaattgctgacgtcaaaattatttggtcatgccaaaggtgcgtttaccggcgcagacagagcggtatccgggttaattgagaccagtaatggcggcgtattgtttatcgatgaagtgcaccgtcttccgccggaagggcaggaaaaactgttccattttatggataacggcacctggcgtcgcttaggcgaaagcagcgatgaacgcagcgccacggtacgtctgatattcgcctctaccgaagatctggaaaagcactttctggcgacatttattcgccggataccggtcattgtcaaaattctgcctatcgccgaacgcggacagtatgagcggctggcgtttattcaccatttttttcgtcgcgaggcgcagcgtcttcatcacgatttgtcgctggatagtgaaattatcagccaactgatgcaggagaccctggaagggaatgtcggcggcctggaaaatctcattcgtaatatttgcgccagcgcctggactttcggccagcgtgacgatggggtactggaagtaaaagccgggcaactgccggatcgtctgctgatggaggtgccctttaccgttccgcagacggcggaacgcatcatgatttatcgcgaaggtggcgtttttccgcgagtttccggtcagcatcaggaatatttacggttgacggaaaacatttgcggcctgtgcgaagagctggcgcaggagaatatttccgcacggacgtttgacaagctggtctatcaaaaccttacgttatatctcgatgccttaatgaataaagagagccctcgcgctcgtcaggacaagcggctgcgttttatcgaagatgtcgggaaagcgatcgctgcacattacgatctcgaactgaatgcggaattcgcttatctcactggacgttaccttaccagcctgccgttaacgccggtggaggcgtcgccatcggttcgtcatgtgatgctgcgctggctggaggaggcgccggggctggcgcagcgtgtggcgcaaaaactgctggacgtggtaaataataaatatgatttgttaatcgacacgctcgacagactggtcgtggcggccatcgtcagtaatgccattgacgccaccagcggcggtaaggtaaaagcgctgatcatcgcgcatggttattcgaccgccagcagcattgcaggcgtggcgaaccgtctgattggcgaaaagatttatcatgcgatggatatgccgatggaggtcgcgtttagcgatgtcagccgggccattgtcgattatctccagcatacggatacccgcgcaggcgtcatggtgctgatcgatatgggatacaccaaagagatcgccgatgcgcttttgagcgtaattcatggcccgctggtggtggtcgataacgttacgacgcgtctggcgctgaacgtggccagcgagatcgcgctgcaaaaaaacatcgaacagatcgccgaagagatcgtcccgttaaatcagtcgcgctgggatgtcttctggcccgcgcagaaaaaagcgcgcgcgctgctggtgacctgtattaccggcatcgggacggcgtttaaatttaaaaatttgatggaaaaaagtcagttgaccgactttgatattaatattatcgcctgtgaatatactcgcctgaaaaacagccggatggcggcctcgttgctgaatcagtatgaagtgattgcggttgtcggcaccattgacccgcagctggcgggcgttccctgggtggggattgaagagctgcttggcgagcaggggtatgcgcatttaagtcagttattaagcggttatcttaacgataaacaaattgcgttaattaataaaaatatggttcgcgaattttcgttgcataatgtggttaattcgctgaccattctcaatgccaataagacgatagggcatatcgaaacgattattgccgaatggcaaagtacgctgggcttcagctttaataataatttgattattagtttatatgttcatttgagctgtatgattgagcgactggtcatgcgcaatgaaattacccactataaaaacatgacggaatttaacgagcggcatggtgaatttatcgcgatggtaaatcattcatttcagcggttgaaaattctttataacgtggcgctgccggtagcggaaattggctatatccacgatattttcgaattacggatagaggattttcactggtagctgcggtagttcagggaaaaaggggcgctagcgccccgcagaagaaagacctgatggcgctacgcttatcaggcctacagatcgctttgtaggctggataaagcgaagccgccatccggcataactattaatattcaactttccacatataccggcgggtggtcagtgggtgattacgggctgtcgccagagcgaggttataaacgtccagcacacagttgtgcaacagaccgcagaagtattcgccaacgtcggtggacagatcctgaatgccgagtttatccgcatcgatcaactgcagttttccctgatagcgttcaataaagcgaatcgcacgatcgtccagcgggcgagtgcgaccactgctttgcagcaatataaacggcgtgcccggctcggtgatttcgaacggtccgtggaaatactctccgctatgtatgctggcggagttgatccactgcatttccagcagaatacagatagactcctgatgcgcggcgccgaaagaggggccgctgcccatcatatagaccaccttctcatccttccattcggcggcgaaacgctgagcatcttcttgtacctgccgttgggcgccgtgaacaacgtcgctaaagcgcccaaatgcgctgactaactcatcgtattgcgcatagccctctgtttgggcgagaatttccagcgccagccacaggctgtatgcggctttttgttgtgcagggtcgaccgtttccggataacgcgcccactgatattcaatgatgtagtcgctgtattcgcacaacggcgtgtcaggttggtaaaccagaccgatggtcgccgctcctttttcacgcgccacgcgggcggctgcgacggtttccgccgtattgccctgctgcgaggcgagaataacgacgctattttttcctaatgcttttggtgtggcgtggacaaattcattactggtgatataaccgacagccagttttgacgcttcacagtccagaaagtattttcctggccagaagccggttaatgaaccgccgcagccgacaaaccagacgcgttcaatgttttgtttacctaaaatatcgctaataatacggcgggcattttcatgagcaacagacatatttatctccttagcgtgtagcgcgtcctccgcaacagcgcggataataacgagcattaataaaaattaaatttcttgcttacttttcattttttgatggaattgcggatctttgggtatcgccggattaatgcctttttgcgggggtaatatcgcacatagcatttgtagcggaatgatatattcaaagacggcaaagtcctcatcattgacaaacgggaaattcagattcagaccattattttctacctgcgggccgatgcggtaaatagacggcgtccactcaccgagtatttgcgccagccgatcctgacgcgcgtcaggctgcgggtcgagcataatgagtgcggattgcgcattaaaggcattgtaaataccgtgaataaactcctcgaattcgtagcccgacaccggacagcgcaacgtctccagcatcttgagcgcaccctcctgcaccgtaccgaacagcgttgccgggccggtcagacgaatatctgcgctatcgcgcagcgccagcgcattggtttgcgcccacgcctgcgaggcggtaaccagcgcgggcaggtggttaaaggtcttttccatccgcagcagcagtgaccggcgctgttcgccgtccagccgctgttgctgcccggcgacggcgagcgccagcagcatcaaattgagaaccgtgcagtgatagccttttgttttcgcgccagcggtttcttcgccgcagggaacggtaaggatataatccgccgcccggtcgatagtcgcaggcgccacgccagccattgaggcggtgatatgaccaacattgcgggcgcgctccatcgccgccagcgttgagaggctgccgccgccctgggagatgccgacaaccagcgccttgccgctgcgggcaagcgtctcgtcgtcaagcataaacggccagcagacatccactggtaatgcgcaccagcgctgcataaacgtgcgagcggtcagcgcgccgtggtatgacgtgccggagcctgtcagaataatgcgggtgacgccgcgttccgttagcgcctgcgccgcgcgccagagatcttcccgcgtctgcgtcagcatctccagcaggcgaaggggcgtctcgttcatatagtcttctacttgcatagtgttacctctcgtcaaagcaggcccagcgcgctggcaagaagcccaaacacgacggtgcctaacaggatccagttaatgttcacgcccttacggataagtttgtacatgccgagcgtgaagagcagcggcagcagggaagggaggattttgtcaataaaatcctgcactttcatggtagtctgcccggcggtaaagctcagcggggttgtaatgtcgatcatgctggcggtcatggcgccgacgaccatcaacccgacgattgacgcgatataagtcaccctgtccatcagcccgctttgccagaggcgcatcagccaggtggtccccgcccggtagcccagtttgagggcgtaccagcggcagaggatgtgcggaatgttatagaccagtagggcgagaatcggccccagaatgctgccctgctgggcaaagtagatccccatcccggcggcgataactttcagcgatccccagaagatggaatcgccgatcccggccagcggccccatcaggctggttttaacggcattgatcgactcttcgttaaagtccgggttgcgttgattttcctcctccatcgcaatcgacaggccaaagacaaacgttgacagatgcggcgtggtattgaacagcaccagatgacgctgtaaggcgcgccccagttcggcggggtcctggtagatacgctttagcgctggcgacatagcgaaggcatagcccatatgctgctggcgttcatagttccacgatccttgcaacgtaaaggagcgccagaaaacgctgcgtaaatcgcgggcggtgatgcggctttcgctttgcgagtgagcctgtgcgtcgtcgatcagggtctgcgtcacttcactcatgattagccctcctgttgggatgtgttaagaaactggctgataatgaaagccagcaccacggcaaacagcgcgatggcgatgatgtccagtttggtatatgcggcgatcagaaagcccagcccaaggtaaggcattaatttgctgctaagcatcatgctgatcagcaacgcgaaacccagcgccggcaaaatcttactggcgacaaccaggccattggtaataaaggcgggaatggcgtcgaggaaccaggtgacggcggcagaaccgagcaaaatggcgaaaaagaccggcagaaaaccgcttagaaaatagagcagcgttgggcctcccaggtgcataacggcaaccatccgggtattaccctgcgccgcataacgatcggccatgtggccaaagcgggcgttaaccacgcgcaccaggacgccgagggtctgcgccagcatagagataggaatcgcgatggtcagcgccgcttcgggcccgcgcccggacataatagaaaacgcggtcgccagcaccgaaccggtgacgacatcaggcggtaccgcggcgccgatagcgacattacctaaaaagatcagttccagcgtcgcgccgatcagaatgccttcgtgtaaattgccgcagaccagaccggtgagggcgcacatcaccagcggacggtcaatcatcgacacgccgagtaaacgcccgtcaagaatgcccagtgcggcaatcaggccgagcagcgttgcggtgagcaacatagtgacctccgggttcagagtttatcgttaagcaattcggcggaatgagccggaacctggcgcatttccagacggatgcctttggcttttagcgcctggctatcggcaatctcctgctcggtcaggtatatggctttgccgaactgctgcgcgccctctttttgcgcgataccgccgtagttgataacgctaatccctggcactttctcgacgaaggcgagggtttcggcggtatttcccagcaccaccatcacttttttgtgatccagcttgccgctggcgagtttttccgccgcctgttccaccgtgataatgtccagcgacacgccagcgggttttgccagacttaatgacatagagacaaacgcgtcgccggcggcgttggcgttagcgacgatgatatggtcgatatccagcgcccgggtccaggcgaagaccacctggccgtgcagcaggcggtaatcaatgcgcactaatttgatcatgggattctccctgtaggtcagcggatggttgtgttattagcgtgttgataaagacaatggattcacgcgccgcattggtggcgtaggtaatggccgcgtctgtgctttcttcttcacagagtaaaaactccagcaacagggtcatgttgacgccagccaccacaaaaacgtgacggtgacgcatcagcactttcgcggcgctattgttgatgctgccgccgagcagatcggtaaacaccaccacttcttcgccgttggcttgcgcgatcagattttcgagggtttgttcaagctgctccgtggtgacaatatcgccatcgtaggcgcaaaccggtgtcacgccgtgttcgtcgccaatcagcagcgatagactgttaataagtccgcgggcaaaagggccatggctggctacataaacatgtctcacccgttttctccttcatccagatagggggtatccagatatggcaaacggcgtgccagttttaaatgttatttattttcaataaattgaaagaggaagttaacactagcgatgtaaaacctggcacttcgcgccattgatcattgaggaacctggcagaaaggtgaaaaaagccggacgggcgtccggcttaggcaggggattaaacttccgtcagtgtggtttcaagcggcagacgtgatttcggcagcccggcgttgaaatcctcgacgctatgatggccgaccggcaccacgaccagactggtatagcctttttctttcagaccaaattcagcgtcgagcacctcggcgtcgaaaccttcaatggggacggcgtcgagacccatcgcggcgacgcccagcagaaagttgccgacgttcagataaacctgcttcgccatccactggtggtcatctttcagcgagacgcggtgcatatcggcgaaaaagcggcgacctttatcatttgccgctttagcttccggcgtagcgaaacggccatcagcatcttcctgatcgacgacgcgctcaagccatgcgtcatccattgcggttttggcgcagaagaccaccacatgggaggcgtccagcattttgcgttcgttgaacgtgtagtttccggcagcggattttgctacgcgcgctttgccttcttccgtactggcgacaataaagtgccacggctgggaattggtgctggaggggctgtactgtagtagtgtttttattttatccgcttcttcggcggtcagttttttgctgggatcgaacgccttagtggagtagcgctgtaaggcgacagaaacgatatccataaatgctcctggttggtttagtacccttttgtatcagcagggtaccgggttatcggtaaaaagataagggaggaaaatgcggaaacggttattgcatcagcgcggccgcaggcgcagttgctctcttttaggcagcccgtctacgaccagattccatgagtcatttatcaaatcgttgagtagcgagacggtgatatcctcgcccgcatagactgaaatccagtgtttcttattcatgtgatagccaggcgcaatgctggggtaaatttgttgatttaccagggacttttggggatccgacttcaggttcaccactgggcgacagtgatgttcagtgaacagcatgaatattttgccgccgactttaaacacatcgtactgtgggccgaaaggccagcagtgttcggtaaaaggcagttccagcgcaaagcgttttgcccaggcgtgcagtgtttgaccgtccattattgctcctcgcgagtcagcgcgcgccacatggcttcgaatcccagcgcaatatattcgccagcgcgagcgggatcgcgcgcggcgaaatccattgttgtttcagccagcgccagaaaaaggccgtcgccgaaggcgcggtattcatccgacataaacaccatcaaaacggaacgatgacataaatcgcgcaattcggggaacatatcgtcggcccgttgttccgtctctttggtgagcttttcgctgacggccagttgacggatcgcccgatggcgcgcgggatggttcagaccccaactgatgtaactgttccagataaaacgagtcatcattttggcatcggtaatggatcgatccagctccattatcattgactggcagagatcctgctttaaatgcaaatacaacgtgttaatcagctcatctttggtcgcgaaatagcgaaacaatgttccttctgcaacacctgcgttacgcgcaatcaccgccgttgaggcggcgataccggattgcgctatcgcctgggttgccgcttccagtaatgcttgttttttgtcttcactcttcggacgagccactacacgttacccttatgtctggaaaaacatgattgaatcatgcccgttgtcgcgtcgcaacggtgaatgtcaacctttgaaaagtaccttgacggcgtatctttgctttctataatgagtgcttactcactcataatcaagggctgccgcatgaagtggtagaaaagcatattgcaggccatgcgataagctgtctcacaatttgtgtggttattactatgcttattgctgttgccgtaaatgtgcggtgcgggagccgctgacgagtttgatagaggggagagcacgatgaccatttccgctcaggttatcgacacgattgtcgagtggattgatgataatttgaatcagccgttacgtattgatgatattgcccgtcatgcggggtattccaagtggcacctgcagcgcctttttatgcagtacaaaggggagagtctgggacgctacgtgcgtgaacggaagctaaaactggcggcgcgcgacctgctcgacaccgaccagaaggtgtatgatatttgtctcaagtatggttttgattcgcagcaaacctttacgcgcatttttacccgcacgttcaacctgccgccaggcgcttatcgtaaagaaaagcatggccgtacgcattgaaatgtttaatcggccagcgaaaaccagcgccgccagataaagcgaatgacataatattccagcgcgccgagcaacagaaaccataaacaaaacaacaaagtataaagctggttgagatccataagatgaaagatcccgaccagtttttgcgccagcgcaaggccgagcgaaggggcgggcagcagcaggctggagagcaacgccatcagcaaaataccggcagcggtcatcaatgattcaagcgggtgtttcatggctttgttaaacgtaagttaaaacgccattgtccgggatatcgcctggtaaggcaaatatgctgtctattgtcccgcccagatttcacaatgtttttgtaccagacctatcagcgatccgccgtcggcaataaactcccgcatatattgcgcttcgttaccgccttttttcacctgcagacgtagcgcgtcaatggcgctgtcggcgcccagcttgcgcgcagagggggtaacgttgtccagcagacgcagcgtatcatctgccaggcgacggcggtcgccggtataggcatcggttagcacgccctccagaccatagcggcaagcctgaaaacggttgaatttatataacagatagtcttgttcctgcggtttaaagggacgctcggtcagcagccagtgcgcggtcgcctgaatcaaccctgccatattgatggcatgatcaagagtgagcggcgtatccatcacccgaacttctaccgtgccaaaggccgggctggggcggatatcccagtgcaaatctttgatgctgtcgatcatcgtggtgtaagacagacgacgaaatagtccggcaaactcttgccagttactgacccacggcatgggcccgttatcgggaaaagcggaaaaaatattcaggcgcgcgcaggcaaaacgggtgtcagctccttgcatatagggggacgcggcggagagcgcaataaagtgcggcacaaaatgcgacagcccgtgtaaaagataaatcgcatcgtcgccgttcgcgcagccgacgtggacatgctggccgaaaaccgtcgcctgttgaattaagtagccgaaattttccagcgtgcgttgatagcgctcattatcacagacctcctgacgctgccatttttgaaaagggtgcgtaccgccgccgcaaatgccgagatggtgttccgacgccgcctgtaaaataacgtgctgcatagcagaaagttgggccgccgcctggtcaatatcgcggcagacgcccgtggccatctccagcatactttcggtgatatcgtgcttaatttctcccgcagtaagttggggcttaacggcgtcgatcagcgtagaagagtcctgacttaaatcgtagccaggtggattgatcacctgcatctccagctcaataccaagcgtataaggttcagaaacgtgaaaatcattcagcgccatagggatctcatttatcggggtattgcgctaagtatagaagcgggagcgctcctgtcgtggggaacgcgcgttattgcagaaacaagagtaataacgctattgtcacgttgaaaccattctgtacggacggtacgttcagccatcgtggcggcaaaggctggcagcagatgtaacgagatgtgcgtggcggtaagcgaggtaacttttgcgctattgaatcccgggagcgtgacgcggtctgaaaaggctttataaacgctctctttggcggagaaagccagcgtcagggcaagcggaaaagggagcaagctcgcctggagaatttggcgctcatcgctatcaataatggacggcgccagctctgtcgccgtgtgctgactcatgattttttctatatcaatgccgatacgctgtcgggatatgacggccagcgccgttgtcgcacagtggctgatgctgccaaataggccgtccggccatagcggctgtcgcttgtcgcccataccgggcactgtcctgacgcccacctcgcgtagcgcatgaacggcggcaatgcggcctgccagatgttcagctttacgcttgcgtccggcagaccggagccgatcgtgatgaggtagccatagcaggtcgtgttcgcgaaagctgctcgcatcaaagtcgacgatatgcagcctgtgtccggcaaagggaaggggaaaatgagatgtcagcatcgtttttgccaattccctccccgaatgagggagggaaggttgccatcagaaatgggtattaatgctcatataccacgtacgtcctggttcgttataggtgtacgcgccagcgcccgccatataagcgccagtttgcgtatccctgacggtttgcgcgttaccttcacgccacagacgtttgtcaaagaggttatccacgccaccggtcaggctgacatttttggtcacgtcccaggtcgcgctcaggccaacaatactgtatgggctgaccgcttgcttatctgttccggtaacggggttaccctgataatcatatttcttcggctcttgtttgccgtaccaggtgaaggtcgattgcagagaaacgtcctgacgtacctgccagctcagggttgagttaagcgtgtactgtggaataatcgacaggcgttcgccggtctctttgtttttactctgcagcatatacgtaacgttattcgtccagttgacggtgtcgctaaccggtacgtttaacgtgccttccagaccttcaacgaccgctttcggcacgttctcccactgataaacatccgttttgccgttgttgatacgctgcaacggcactgtacccgcttcaatcttattgcggtaatcattgcggaaccaggtgacgccggccagccagccatcgcgtttaaattccagaccgatctctttattgatgctagtttcggctttcagatcatcgttacccatcatatagcagccgatgccggtacccgcgccagtcgcgtagcaaccctgacctttactgtacaaaatatagtttgggttagtctggtacagactcggggctttataagcgcgggcgattcccattttcagggtaaagtcatcccccagaccttgcgacaggttgagggacgggctccagttatcccccacaatactgtgatgatcgaaacgtagccccggcgtcagcatggtgctgtcggtcagttccatgttgttttcagcaaacagagagaaaatttccgcttttgaataggggctacgattggtactgctgtaacccgggatatttccccccataaaggtttgcgagttggagagctggtctttcatacgctgttgggcccattcagtacccagcgtcaggttttgattgaccagcagatcgaaaggaaggctcacttcgctgtgtagggtgacgtcattcaaatcggcatcggcatatttttgcgatgctttgggatcgaaaattccttcggtgccgcctgccaggccttccggcatccgggagttacgggtatgttcgtattgcacccagttactggtggttacgccattattccagccgccgttccaggtcagagagtagttctgccgatagaggcggttcgtctcttttccgtaattatctttcaccagttggttcgtattggtgttctgagtatcgccggcatagagattgccctggcgactgtatccggcctccagctccagagactgaagcggagcaaaatcccaacgaaccacgccgttgatatctttgttaatgaccccctcgcgtcctgctggtagcgtgtcggcgtaactcccggtacgttcagactgatgcccctggttaatattacgcgcatccgcctgcgttttgtcgaggttgccatacaggcggaagctgaaatccccgcccagcgggccgttcaggctaaagttagtgcgtttggtcgcgccttcgtctttatgttccggcgcgttgaaataggtattccaggaaccgtgccactcgctaccgccttttttggtaatgatattgactacgccacccgccgcgccgttaccgtagcgtgcggcggcagggccacgcagcacttcaatgcgttcgatcatctccggcggcacccacgcggtatcgccgcgggtatcgcgttcgccgcgccagcccaggcgcaccgagttacggctggtgacgggtttaccgtctatcaggatgagggtgttttccggccccatgccgcgaatatcgatttggcggttattcccgcgctgaccgctggtggagttgccggtcaggtttacgcccggcatggtgcggatgatttctgacacgtcgcgcgcgggcggatttttgcggatctcatcggcggtgatggtggatacgcctggcgcctgtaggttttgctgggcagcggtcaccacgatggtgtcttcattggtgagcgcagcgctatcggttttgtcttccgccatcacgggcagagcggccccgtaaatccctaaattgaccagtaaggtcagggaatgaatcttcttgttcattgtatatcctgcttttctttagccacataagccaaagcgcccgtcaaaggcattggccgggtggtgaaattgtgttcgcgcgtcccatagcgcgacaatacgctattgcaaatgcaaatagttatcaataatattatcaatatatttcaccttttatatacaaaattcataataaacacagggttataatgaaagaggcgctggcaacgggaagtgaggcctggtggaggacgaaaaccgggccggaatggatacgggaaaaagacggaaattatcgggtcactttttggtggcgcgacccgcagggaaacgaaacacactccccgatacggcgtgtctgggtctacatcactggcgtaaccgatcatcatcaaaacgcgcagcctcagacgatggcgcgtattgccggaacggatgtctggcgctggagcacggcgcttagcgctaactggcgcggcagctactgttttattcctaccgagcgcgatgacgtttttgccgcttttgcgccgggcgaaacgcccgatcggaacgtgctgcgtgaaggctggcgacagctattaccgcaggcgattgccgacccgcttaattcgcaaagctggcggggaggacgtggtcatgcggtttcagcgctggaaatgccggatgcgccccttcagccgggatgggatcgtcctgaaacgccgtactcgccgcctttgatgatgcagtggcatagcgaacgtctgggtaactcccgccgcgtatggatattgacgaccggagacgaggcgccggaggaaagaccgttggctattctgctggacggtcaattctgggcggaaaatatgcccgtctggcccgcgctcgcctcgctgactcatcaacgcctgcttcccggtgccgtctatctgctgattgacgcgattgatactcaacaccgcagccaggagttgccctgcaatgccgacttctggctggcggtgcagcaggaactgttgccgcaagtcagagccgtgacgccttttagcgatgatgccggacgaacggtggtcgccggacagagctttggcggcctgtcggcgctgtatgccggcctgaactggccgacgcgttttggctgtgtactgagccagtcaggatcgttctggtggccccatcgcatcaccccgccggagggggaagtcattacccggctgaaaaccggcgcattatgcgcgcgcggactgcgtatcgtactggaagccggcgtgcgtgagccgatcgtgtttcaggcgaatcaggcgctttatgcccaactgaatacttcgcagcagtccattttctggcgtcaggttgacggcggacacgatgcgctttgctggcgcggcgggctaacgcaagggctgatgctgctttggcagccgcttatcgacacgctttaaccgggcacatgtccatgacaggagttgagtatggaattcagtaatcccttcgataatccgcagggacagttttacatcctgcaaaatgcgcagcgtcaattcagcctttggccagcggcatgtgcgcttcccgcaggctgggacgtggtatgcgaaccgcaatcgcaggacgcgtgccagcagtggcttaatacgcgctggacaacactgaatccggcgcattatgccgataagcaggaggcgaaatgacgcagcgtttaccgttagtcgccgcccagccggggatctggatggcggaaaaactctctgatttaccctccgcctggagcgtggcgcactatgtggaactgaacggcgagctggatgccgccttgctggcaaaagcggtagcggtagggatgcaacaggcggatacgctacggatgcgttttaccgaagagaacggcgaggtctggcaatggatagatcctgagcacaccttcggcgagcccccgattgccgatttacgcgaccagcccgatccgcatcacgcggcgctggcgttaatgcaggcggatttacggcaaaacctgcgcgcagatagcggtaagccgctggcgtttcaccagttaatccgcattgatgatacccgctggtattggtatcagcgctatcaccatttgctggtggatggctttagcttcccggcgataactcgccagattgcggcgatttatcgcgcctggcagagcgacgctcctacgccggagtcgccttttaccccctttgcggatgtggtcgaggaatatcagcgctatcgccagagcgaggcctggcagcgtgacggcgccttctgggcgcagcagcgccgcgagctgccgccgccggcgtcaatgtctgccgcgccgttgccggggcggtcggcgagcgcggatattctgcgtatgaaattgagcgcgccggcgggggcgtttcgccaactggcggcgcacatgcctgagataccgcgagcggatcttgccctggcgctggtgacgttgtggctggggcgattatgcgggcgaatggattatgccgccggatttatctttatgcggcggatgggctcggcggcgttaacggcgaccgggcctgtccttaacgtgttgccgctggcggttaaccttcatgcaacggaagatctgccaacgctggcgaagcgtcttgcggcgcagttaaagaagatgcgccgccaccagcgttacgacgccgaacagattgtacgcgatagcgggcgagccgcaggggagacgccgctatttggcccggtgctcaacataaaagtgtttgattatcatctggatcttcctggcatacaggcgcaaacccataccctggcgacggggccggttaacgatcttgaactggcgctttttccggatgaaaacggcggtctggatattgaattgctggcgaatgcacagcgttacgatgatgccacgctctcccgccatgccttacgattgatggcgcttatcacgcagtttgcggataacccggcgctgcgctgcggcgatgcgcaaatgctgctggcggaagaacaaacgcaattagcacaccttaataatacggcggtaacgattcccgccgccacgcttagcgatttggtggcgcagcaggcgcaaaaaacgccagaggcttccgcgttggcagatgcgcattatcactttacctaccgtgaaatgcgcgaacaggttgtggcgctggcgtacgcgctgcgggaacgcggcgttcagcctggcgatagcgtggcggtggcgttgccgcggtcggttttcctgaccttagcgctgcatggcattgtcgaggcgggcgccgcctggctgccgctggataccggttatcctgacgatcggctgcgaatgatgctggaagatgcgcagccgaaactgttaattacgactcaggcgcagctggcgcgctttcacgatattccggggatggaatatttgtgttatagccaaccgctaccggtcagtgacgccactccgctgaggctgtcgttaccgcatcataccgcttacatcattttcacctctggctcgacgggcaggccgaaaggggtgatggtgggacaaacggcgatagtcaaccggctgctgtggatgcaggatcactatccgttgacggcggatgatgtagtagcgcaaaaaacgccgtgcagttttgacgtctcagtatgggagtttttctggccgtttatcgccggggcgaaactggtgatggctgaaccggaagcgcaccgcgacccgctcgcgatgcagcggttctttgcgcaatacggcgtcacgaccactcattttgtgccgtcgatgctggcggcctttattgcctcgctcacgccagcgtcggctgggaaaagctgcgcttccttaaagcgcgttttctgtagcggcgaggccctgccgacggcgctgtgccgcgaatgggagacgttaaccaacgcgccgctacacaatctgtacgggccaacggaggccgcggtggatgtgagctggtatccggcctgtggcgatgagctggcggctgttgacggcaacagcatcccgattggttatcccgtctggaataccggtttacgtattctcgatgcgcatatgcagccggtgccgccgggcgtggctggcgatctctatcttaccggtatccaactggcgcagggctatctggggcgtccggatcttaccgccagccgttttatcgccgatccttttgcgccaggcgaacggatgtaccgtaccggagatgtggcgcgctggctggattccggcgcggtggaatacctggggcgcagcgacgatcagctcaaaattcggggtcaacgtattgaactgggcgagattgaccgcgtcatgcaaacgctgccggatgttgaacaggcggtagcacatgcctgcgtctttaatcaggcggcggcgacgggtggggatgcccggcaactggtcggctatctggtgtcgcactccggtttgccgctggatttaccggcgctgcaggaaaaattacgccaaaaacttcccgcgcatatggtgccggttgtgctgttgcaacttgccagcttgccgcttagcgctaatggcaagctggatcgcaaagccctgccgctgccggacctggcgccgcgcgtgaaagggcgcgcgccgcagtccgcaacggagattgctgtcgccgcggcgttttcccgcctgctgggctgtgagattaacgacgttgaaagtgatttctttgcgctgggcggacactcgctgctggcgatgaaactggccgcgcagctaagccagacgtttaaccgccaggtgacgccggggcaggtgatggtggcgtctgacgtggcgcagttgagtaagctgctcgatactgacgatgacgaacgctcgcgcaatctggggttcgggccgctgttgccgctgcgtgaaagcgatggtccaacgttattttgtttccatccggcgtcggggttcgcctggcaatttagcgtattatcacgctatctcagcccgtcgtggtcgattatggggattcagtcgccgcgccccgctggccctatgcaaaccgcaaccacccttgatgaggtatgtgaacatcatctggcgactttgctcgcccggcagccgcatggcccttattatttattaggctattcgctgggcgggacgctggcgcaagggatcgccgcccggttgcgcgcgcgcggcgaaaccgtggcgtttttggggttactggacacctggccgccggaaacgcaaaactggcgggaaaaagaggcgaatggcctcaatccggacgtattggcggaaattgaacgtgaacgcgctgcgtttgtcgccgcgcagcagggaaatgcctccgacgccttatttaccgccattgaaggcaattatgcggatgccgtccgtttgctgacgacggcgcatagcgtaccgtttgatggacatgctacgctctttgtggcggataaaacggtgccggaaggcgtatcgcctgaacagagctggtcgccgtggatagcgtctttggctatttatcgccagccgtgcgcgcatgtagatattatttctccctccgcttttgaaactatcgggcccatcatcagcgaacttattaataaataacgggcgttgtttctgcctttaacaaattaaatcctgaaacccataataattactaattattatgggttttttattgcaactattaattcttttaacataagtgatacatgctacaggcaagtttaattccgaatatttagcttttcgggcactggcgcgtaaagattgtttcggataattctgacttgctgttagaatctctgacaggaatgtgttctttcattggataaatttttcaggtcatacggcatgccatctcttaatgtaaaacaagaaaaaaatcagtcatttgcaggttattcactgccgcccgccaacagtcatgaaatcgatttgtttagccttatagaggtgttatggcaggcgaaacgtcgtattcttgctaccgttttcgcctttgcgtgcgtggggttgcttctgtcctttctgctgccgcaaaaatggaccagccaggcgattgtcacaccggcggagtcggtacagtggcaggggctggagagaacgttgaccgcgctgcgcgtgttggatatggaggtaagcgttgatcggggcagcgtatttaatctgtttattaaaaagtttagctcgccctcgctgctggaagaatatcttcgttcttctccgtatgtcatggatcaattaaaaggcgcgcaaatagacgagcaggatcttcaccgggcgattgtcctgctgagcgaaaaaatgaaagcggtggacagtaatgtcggcaagaaaaatgaaacgtcgttattcacgtcgtggacattgagttttaccgcgccgacgcgggaagaagcgcaaaaagtgctggctggctatattcagtacatctccgatatcgtcgtgaaagagacgctggaaaatattcgtaaccagctggaaatcaaaacccgctatgagcaggaaaagctggcgatggatcgggtgcgtctcaaaaatcagcttgatgccaatattcaacgtcttcattattcgctggaaatcgccaacgccgccggtattaagagaccggtttacagcaatggtcaggcggtaaaagatgatccggatttttctatttctctcggcgcggatggtatttcccgcaaactggaaattgaaaaaggggtaacggacgtggccgagatcgacggtgatttgcgtaaccgtcaataccatgttgaacaactggcggcaatgaatgtgagtgacgtgaagtttaccccgtttaaatatcaactgtcgccgtctctgccagtgaaaaaagatggcccgggtaaagccatcattattatcctggcggcgttgattggcggtatgatggcctgcggcggcgtattactgcatcacgcgatggtctcgcgtaaaatggaaaacgcgctggcgatagatgaacggttagtctgatttacccgaaaagccggatagcgatatccggctttgtcatcagtgtgggcgactatcgccgccccagcggtaccaccagcggcgtcccggcaaccggatcgtcgataatcatacagcgcagcccatagattttttcgataagctctgcggtaacaatctctttcggcgcgccctgtgcgacaatattaccttcgcgtaatgcaatcaaatgcgtggcgtatcggcaggcctgattcaggtcatgcaggacggcggcgagcgtatagcctttttcgcggttgagatcgcttaacaactccagcaaatcaatttgatggctaatatccagccacgttgtcggctcatccagcagcatgatggacgtttcctgcgccagcaccatggctatccacgcccgctgacgttggccgccggacagagtgtctacactttgcgccgccagtgaggtgatacctgttgcacgcatggcactggcgacggcatcggcatcttccttacgccagcgggtaaataacggctgatgcggataccgccctctggcgaccagctcttgtacggtgatatcgcccggcgtggtagcgttttgcgccagcaatccgatgcgccgcgccacctctttactggcgtaacgctgtatttgttcgccatccagccagacatggccgtcaacaggcgtcatcagacggcttagcgtacgtagcaacgtcgacttgccgcagccgttagggccgatgatggcggtaaaatggccgtccggaatcgaaacattaaggttttttgcgacggtatagctgccataacccagcgttaactggtcgccgcgcaaacgggctacggattcggtcattttttgcgggactcctgaattaacaagacgataaggtaaataccgccgaggctgacggtgaccacgcccactggaagctgataaggcataaacagttgctgcgcgcacgcatcggcggccagtagtaataacgcgccgcacagcgccgactgggttaatccccagcgcgctgtgccgctaagacggcgggcgatgtgcggcgcgacaagggcaataaacgagatggggccagccagtgccgttgccgcagcggtgagcgacaccgccaccagcatcagcatcaggcgtgaccgctccacgctaacacccagcgcgcaggcgctgtcatcgcccatctccagcagccgcatacgacgcaccagtagcgcggcgcctgtcagcatcaccataatcagcggcgccgaaggccaggtttttgcccatgtcagaccgttgagcgacccggcgttccataagccagcggtgagcgccgtttccagcgacgcctgcaacagaagccaggtattaaaggcgactaacatcgcgcggatgccgataccgatgataatcagccggaaagtttcaatcccgttacgccaggcgagcagccagacaatcaatgacgtgacgataccgcccgccattgccgccagcgcgatcgcggtaagatgctggccaaacaggaccattgcgaccagtacgccgctccaggcgccggtattaaagcccatcacatcagggctgcctagcgggttacgcatcaacgactgaaaaatcgcgccactgacgccaagcgcagcgccaatcagtagcgccattaatacgcgcggtagtcgccattcggttacgacaagggtgatgttacgcggcgcgtcgcccagcagcgcggcaataatctgcccggtctcaaggggcacggcaccgctttgcaggctccataagccaatggcgaagcagccagccgccagaagcaggcagcttacgataagccgacgagaaagaaacatcacaggccgcctccgctcgatttacggcgtaccagaaagataagtaccggcgcgccgataaacgcactgacgaccgatacgcggagttcgcccggcactaacagacgaccaataatatcggcaaaaagcagcagagcaggggttgccagtagtgttaccggcagcgaccaacggtggtctgcgcccaccagccaacgcgccatatgcggcatcatcagaccaataaaggcgatagggccgaccagcgccgttgcgctgccgcacaagacggtaatcgccagtaaaccgataagttgggtgcgcgccactttactccccagcgccgtcgcagtatcgctgccgaggctcaggctattcagcgcacggctcagaaatagcgccacgatcccagcgataaccacgggcgcaagcgcgactttcaacgtttgcaggctacgaatgtccagcgatcccgcctgccagaagcgaagctgatcataaacctctggatttaacagcgcgatgccgctggtcaatccttccagtaccgcgccaagcgccacgcccgccagtgtcaggcggaccgggcttaactggccgccgccctgactaccggtgaaggcgacaatcagtgatgcgataagcgcgccgctaaatgccatgaaaagctgttccagcggcgtggagaaaccaaacagcgccgcgcccagtacaatggcgaagctggcgccgttgttaacgcccagaatccccgggtcggcgagcgggttgcgagtgagtgtttgcatgagcgccccggcgaggcccaacgcgccgcctgccagtaatccggccagcgtacgcggcaaacgcgcatccaggacgatggtgcaatcggcgctttggcacacgccggtgaacgcctccagcacgacggcggcgggcagcggtttcgcgccaatgaccaggcttaaaaccgcggcgagactcagtaataacaacaatccgggcacggcaaacgcgcgcgtcacggaaaacgagcatgacatagtaacttccctgataatgatagtaattatcgttatctatcttatttggttatgttagcatgtgcagccattgaatggatatttaaaaaaactcgcattaaggcgttgtaatgaatcgacaatcctggctgctcaatctcagcctgttgaagacgcaccctgcatttcgcgcagtatttctggcccgttttatctctattgtctcgctggggctgcttggcgtggcggttccggtacagatccaaatgatgacgcactccacctggcaggtagggctgtcggtaacgttaaccggcggcgccatgtttattggcttaatggtgggcggtgtgctggccgatcgctacgaacgtaaaaaggtgattctgctggcgcgcggtacttgcggtattggctttattggcctgtgcgtgaacgcgctgctgccggaaccgtcattgctggcgatatatctccttggcctgtgggacggctttttcgcgtctctgggcgtgaccgcgttactggcggcgacgccagcgctggtcggaagagaaaatctgatgcaggccggcgcgattaccatgctgacggtacgtctgggatcggttatttccccgatgttggggggcatattgcttgccagcggcggcgtagcctggaactatgggctggcggccgccgggacgtttattacgctattgccgttactgacgctgccgcgactgcctgttcctccgcagccgcgggaaaatccatttatcgcgttactggcggcatttcgttttttgctcgccagtccgcttatcggcggtattgcgctgcttggcggcctggtgacgatggcaagcgcggtacgcgtcctctatccggcgctggcgatgagctggcaaatgtcggcggcgcaaattggtttgctgtatgcggcaattccgctgggggcggccattggcgcgctgaccagcggacaactggcgcatagcgttcgtccggggctcattatgctggtttcgacagtcggttcttttctggcggtggggctgttcgccatcatgccggtctggatcgctggtgttatctgtctggcgctatttggctggcttagcgccatcagttcgttattacaatacactctgctgcaaacccagacgccggaaaatatgctggggcgaatgaacggcctgtggaccgcgcaaaacgtcacgggagacgctatcggcgcggcgctgttaggcggtcttggcgcaatgatgacgccggtcgcttccgcgagcgtgagtggattcgggctggtgattatcggtttgttgctgctgttagtgctgggcgagctacgtcgttttcgccagacgccgccggttagcgatgctggctgatgaaggggcgtttatccgactgaccaaatcggtctggtcagtcggataagactccgataaggctaaaacagggcggcaagccggttaagcaacaatgttgcgctgtaataatccagacggaacgtctccgtacccagggcatagacgcgcttattttgcaccgctggcaggtgcgccagcagcggattggcgtaaagggccgcgacatctttgttgtcgccggcaaacaggaaaagagattcgccgtttaacccggcggccagattttcaccgccaagctgaatgatatcgtggcgcttaccctggcttttgctggtttgcagccctcggggcaatgtcgccagcgtaaagcctaactgtgtcaatagcttgccttgtgctgattctggcgtccacagattggcgctatgcgcggcaggggtatacaccagcgcgctaaccggctgcggcggcagggcgattcgctgtttaaccgtcgtcagttgcgtctcaaactccgctattcgcgcggcggcctgtttctcctgaccggtgatctcgccaagttgcgtgagcaaactctgccagcttttatcgtcataattgatgacgagcgtcggcgcgatagcggagagctgatcgtaaagcgccagcgcggagtcgccgccggtggcgctaatcaaaatgagatccggcatttgcgcggcgaccgtttcggcattcggttcgccgatgtacagccgggcgacatggcgagcctttgctacgtcgctccactggcgcataaacccttgatcgtcggcaaagcggttattcggcgtagtggctccgctggcgacgacgggcgcatcaatcgccagcagcgagcctgtcaacgtcacgctggtagagacgatacgcgcgggtttgtggtccagagtatgaacgccgcggctgtcctggatttgccggggccaaccggcgtcctgggctaaggatattcctgaaattgatataccaaccactaaaagcagccaacgataaaaggcggggagtctcacaatagcgtcctgttattaataaagttaatgcttctcattttcatgtcagcggcagcgagatgcaagccttagtgccatttaactcatgaccagagttgacagagcgacgttttactcttaggttagcgcactaaaaatagaaataataatcattattatacacaaaatcattcaagaagcatcgcaacggcaagggaagaaatccccgcgggcatagataactgtgtgaccggggtttctgatcgcagccaacaaagaggcagcttgaaagatgaagtgtatataagcctttatcattggaggatgatatggatatgtcactggccgaggacgctcaggagacaatggcaacgcttgctcccgatcgctttttcttcatgtcgccgtatcgcagttttaccacttccgggtgcttcgcccgttataccgagcctgcggttgccggagattcgccggatagccctttccagcagaaattgcgccagcagtttgccgaggccaaatcgcagggcatcgccaaccctatcctggtgggggcgatcccctttgatactcgtcagccgtcgtcgctatttatcccgatggcgtggcagtccttttcccgccagcaaaagcagcgcacggcgcgttattttactgaccatcagtcgctgacggtgacggcgcgaaaggcgattccggagcaggatgcttttgaagcgatggtcgcacgcgcggctatgctgaccgccacgccagacgtcgataaagtggtgctttcccggctgatagatatcaccactgatgtggcggtggatagcggagcattgctggagcggctggttgcgcagaatccagttagttacaacttccatgtgccactggcggatggcggcgttctgctgggcgccagccccgaattgctgctacgcaaagagggcgagcggtttagttcgctgccgttagcaggctcggcacgtcgacagccggatgacgttctggatcgcgaggcgggaaaccgactgctggcttcacaaaaagatcggcatgaacatgagctggtgacgcaggcgatgaagcagatcctgcgcgatcgcagcacggaactgcaattaccttcctctccgcagttgatcaccacgccgacgctatggcatctcggtacgccgtttgagggcaaggccaacgccggagaaaacgcgctgacgctggcctgtctgctgcatccaacgcctgcgttaagcggtttccctcatcaggtcgcgaaaaagctgattgctgaactggaaccgttcgatcgtgaactgtttggcggcattgtcggctggtgcgatgccgaaggaaacggcgagtgggtagtgacgattcgttgtgcgaaattgcacggtaatcaggtgcgcctgttcgctggcgccgggattgtccctgcctcttcgccagtcggcgagtggcgggaaaccggcgtcaagctctctacgatgttgaacgtttttggactgcattaaggaacgatgatgcgtatacctttcacccgttggccggatgaatttgcccgccgttatcgtgaaaaaggctactggcaagacgtgccgttgaccgatattctgacccgccacgctgacagcgacaagacggcggtcattgaaggcgagcgcgcattcagctatcgccagctcaaccaggccgcagataatctggcctgcagtttacgccgtcagggcatcaaacctggcgaaaccgctctggtacaactggggaatgtaccggaactgtatatcacctttttcgccctgttgaagcttggcgtagcgcccgttctggcgctgtttagccatcaacgtaccgaacttaacgcctatgcgatgcagatcgcgccgacgctggtgattgccgatcgccaacatacgctgttcgccggggaggactttctcaacacgtttgtggctgaacaccgctctgtgcgggtggtgttattgcgcaacgacgacggcgatcacagcctggacgcggcgatgcggcaggcggcggaagatttcactgccacgccatcacctgctgacgaagtggcctactttcagctttccggcggtactaccggcacgccaaagcttattccccgtacccataacgactattactacagcgtgcgccgcagcaatgagatttgcggtttcaacgaggatacgcgttttctgtgcgcgattcccgccgcgcataactacgccatgagttcgccgggcgcgctgggcgtctttcttgccaaaggaacggtagtgctggcgaccgatcccagcgccacgctctgtttcccgctgatcgaaaaacaccagattaatgccacagcgctggtgccgcccgcggtcagtctatggctacaggctatccaggagtggggcggcaatgcgccgctggcgtcattaaggttattgcaggtcggcggcgcgcggctttctgcgacgctggccgcccgtattccggctgaaattggctgtcagttgcagcaggtcttcggtatggcggaagggttagtgaactatacccggctggacgatagtccggaacggattatcaatacccagggaagacccatgtgtccggacgacgaagtgtgggtggcggatgccgacgggaatccactgccgccgggcgagattggtcgtctgatgacgcgcggcccctatacttttcgcggctatttcaacagtccgctacacaatgccagcgcctttgacgccaacggtttttactgttccggcgatctgatctccattgatcaagacggttacatcaccgttcacgggcgtgaaaaagatcagatcaatcggggcggcgagaagatagccgccgaagagatagaaaacctgttactgcgccacccggtggtgatccatgcggcgctggtcagcatggaagatgaactgctgggagaaaaaagttgcgcatatctggtggtaaaagagccgctgcgagcggtacaggtacgccgtttcctgcgagagcagggcgtggcggaatttaaattaccggatcgcgtggagtgcgttgcgtcactgccgctgacgccggttggtaaagtcgataaaaaacaattacgccagcggttggcgtcacgttcaccgctctgaaggagaaagagagatggcaatcccgaaactacagtcttacgcgctgcccaccgcactggatatcccgaccaacaaagtgaactgggcatttgagccggagcgcgcggcgctgctcatccacgatatgcaggattactttgtcagcttttggggccgcaactgcccaatgatggaccaggtgattgctaatatcgccgccctgcgccagtactgtaaggaacatcatatcccggtctattacaccgctcagccgaaagagcaaagcgatgaagatcgcgcgttactcaatgatatgtgggggccgggactgacgcgctctccggaacagcagaaggtggtagaagccttaacgccggatgaggcggatacggtgctggtgaagtggcgctatagcgcgtttcaccgctcgccgctggaacagatgttaaaagataccggacgtaatcagctcatcattaccggcgtgtatgcgcatattggctgtatgaccaccgctaccgatgcgtttatgcgcgacattaagccgtttatggtggcggatgcgctggcggatttcagccgggaagagcatctgatggcgctgaactatgtggcggggcgttccggtcgcgtcgtcatgaccgagtcgctgctgccgacgccggttcctgccagtaaagcggcgctgcgggcgttgattctgccgttgctggatgagaccgacgagccgctggatgatgaaaacctgattgattatggcctggattcagtacgcatgatggggctggcagcgcgctggcgtaaagtacacggcgatatcgacttcgtgatgctggcgaaaaacccgaccattgacgcctggtgggcgctgctttctcgcggggtagagtaatgaccggctttgatttttcagacaaaacggtatgggtgaccggggcggggaaagggatcggttacgcgacggcgctggcgtttgtcgacgccggggcgcgggtgatcggcttcgatcgcgaatttacgcaagagaattatccctttgctaccgaagtcatggatgtggcggatgccgcacaggttgcgcaggtgtgccagcgtgtgttgcaaaaaacgacgcggctggatgtgctggtcaacgccgccggtattttgcgtatgggagcgaccgatgcgcttagcgtcgacgactggcagcagacgtttgcggtcaatgtgggcggggcatttaacctgttttcgcagacgatggcgcagtttcgccgtcagcagggaggggcgattgtcaccgtagcctcagatgcggcgcatacgccgcgcatcggtatgagcgcctacggcgcctctaaagcggcgctgaaaagcctggcgctaaccgtagggctggagctggcgggctgcggggtgcgctgtaatgtggtgtcgcctggttcgactgacaccgatatgcagcgcacgttatgggtgagtgaagatgccgaacagcagcgtattcgcggtttcggcgaacagtttaagctcggcataccgctcggtaaaatcgcccgtccgcaggagatagccaataccattttgtttcttgcctccgatctggccagccacattaccttgcaggatatcgtggtggacggcggttcaacattgggagcctgacgatgatctggaaacggcatttaacgctggatgaattgaacgctaccagtcagaacactctggtggcgcatctgggcattgtttacacccgtctgggcgatgacgtgctggaggcggaaatgcccgtcgatgcccgcactcatcaaccgtttggtctgctacacggcggcgcatcggcagcgctggcggagacgttgggatcaatggcgggttatctgatgacccgcgacgggcagtgcgtggtcgggaccgagttaaacgccactcaccaccgcgccatctcgcaggggaaagtacgcggcgtttgcctgccgctgcatctggggcggcagaatcaaagctgggaaattacgctctttgacgagcaggggaggcgctgctgcacctgtcgcctgggaacggcggtaatgggatagttctggcaaagtaaaatgcaattgcagcattaacgaagaaaggaagtgatctggttaacactgtaatgtaaaaaatgggtaacaatccggttttatcatgttgttgtgttgttaattacggtaaaggtgttatagaaacaaaatgtaacatctctctggaacacccaaacggacaacaactatgaataaatcagggaaatacctcgtctggacagcgctctcagtattgggtgcgtttgccctgggctatattgcgttaaatcgtggggaacagatcaacgcgctatggatcgtggtggcgtcggtctgtgtctatcttattgcgtatcgtttttatgggctctatatcgccaaaaaagtgctggcggttgacccaacgcgtatgacgcccgcggtacgtcataatgatggtctggattatgtcccgaccgataaaaaagtgctgttcggtcaccattttgcggccattgctggcgcaggtccgctggtcgggccggtactggcggcgcagatgggctatctgccggggatgatctggctgctggcgggcgtcgtgctggcgggagcggtgcaggactttatggtgctgttcgtctcgacccggcgcgatgggcgttcgcttggcgagctggttaaagaggagatgggcgcgacggcaggggtgatcgcgctggtggcctgctttatgatcatggtgatcattctggccgtcctggcgatgatcgtggtgaaagcgctgacccatagcccgtggggaacgtacactgtcgcgttcactattccactggcgatttttatgggcatctacttgcgttatttgcgtccggggcgcatcggcgaggtgtcggtcattgggctggtatttcttattttcgctattatttccggcggatgggtggcggcaagcccaacctgggcgccgtactttgattttactggcgtgcagcttacctggatgctggtgggttatggttttgtcgcggcggtactgccggtctggctgctgctcgcgccgcgtgattacctctctaccttcctgaaaattggtacgattgtcggtctggcggtcgggattctgattatgcgtccgacgctgactatgccggcgctgaccaaatttgttgatggtaccggaccggtctggacgggcgacctgttcccgttcctgtttattaccatcgcctgcggcgcggtctccggtttccatgcgctcatctcctccggcacgacgccgaagatgttggccaacgaaggccaggcctgctttatcggctacggcgggatgttaatggaatctttcgtcgccattatggcgctggtctccgcctgtattatcgatccgggtgtttactttgcgatgaatagcccgatggcggtactggcgccagcggggacagcggatgtcgtagcttctgccgcgcaggtggtcagtagttggggtttcgctatcacgccggatacgttacaccagattgccaatgaagtcggcgaacaatccattatctcccgcgcaggcggagcgccaacgctggcggtagggatggcctacattttacatggcgcgttgggcggcatgatggatgtggcgttctggtatcacttcgccattctgtttgaagcgctgtttattctgacggcggtggatgcgggcacccgtgcggcgcgctttatgttgcaggatttgttgggcgtagtgtcgccagggctgaaacgtaccgattcgttgccagcgaacctgcttgctacggcattgtgcgtgctggcgtgggggtatttcctccatcagggcgtggtcgatccgttgggcggtattaacaccctgtggccgctgtttggcatcgctaaccagatgctggcgggtatggcgctgatgctttgcgccgtggtactgttcaaaatgaagcgtcagcgttatgcgtgggtcgcgctggtgccgacggcctggctgctgatttgtacgctgacggcgggctggcagaaagcgtttagtccggatgcgaaaatcggcttcctggccattgccaataagttccaggcgatgatcgacagcggcaatattccgccgcaatacaccgaatcgcaactcgcgcagttggtattcaataaccgtctggatgccgggctaaccatcttctttatggtggtggtcgtggtgctggcggtcttctctattaagacggcgctggccgctctgaagattgataaaccgacggcgaatgaaacgccgtatgagccgatgccggaaaatgtggatgagatcgtgacgcaggcgaaaggcgcgcactaatctttttacatcaatagccctctccagaataaggagagggcatttgaatgacaggtgacaacgatgttcgatacgctttcgaaagccggaaaatatctgggacaggccgcaaaaatgatgattggcgtgccagactacgacaactatgttgagcatatgcgcataacgcatccggatcagacgccgatgacctatgaagaatttttccgcgagcggcaggatgcgcgctatggtggaaaaggcggcgcgcgttgctgctgagggttgccaggcctgataaacgcaacgtcaccaggctatattctgaaaaattcaactttttcaaacgccgcacgcagggtgtctggcgttaacgtcaccggtaaatagtggatggattcgaccgggcgcagggtatgcgcgatgaccctatcgatctcggcggtgttatgaatatccacgtccagttcgctaagccgggccggcagatgaaatcgccggtacgctgtaatcaattgcgccagcacgtcatcttgtcccagtagcgcgctttgcaccagaatgccataagccactttcgttccgtgcaggaatttttccgtttgcggcaggacggtcagaccgttgtgtaccgcatgggcggcggcgacacgggtatagcgttccccgaggccgccgaccataccgccgccagcaataatcgcatccaccacgtcgcaaaatgcctgggtcagccgacgctgctgtttatccgctaatgcttgttcgctgctgtccagcaggagatcgcgaatagcgcacgcgctgttaatgcccagccttacggtcaatggcaatgtttcaggctgcggcgcaagcacaacggcttcataccatttcgccagcgtatcgccaatgccagctaacagatagtcatcgggcgcctgcagaataatgcgcggttcgaccagcaccagaaaattggcatcatcaaaaatttcgaactgtaacgcctgtcccgcgtcgttataccagacggaaagcggtgtccaggcggcgcaggttgccgcgattgtcgggatagcgacaaacggcagcgccagacggcgggcgagcgctttggcggtatcgagcagcgcgccgccgccgacgcctatcaccacctgacgatcgtcgttgcaggcgtgcgccagttgggcaacatggcgttcgctacaatggccggtaaacggcagatgctttgcgccagcacgttcaaacgcttccggcaggtaaggccgggcggcggcaatcgcgcgttcgccgtacacccaaacggcgtgggaaagctgttccggcgtgaaaaagtcggtcagtctttcgaggcttcctgcatgggaaaaataattcgccgggccggtaacgacgcggatctcagtgtggttcatgttgtgttgtccttagggtcttctcaccgttgttattatatttagacatctaaacgtcttgattgccaaatactaacaccctgtgatagtgtgtcaacaaccacatcactggcgggtatgaagataatgagaaataacccactgattccaaaaagcaaattgccaaatcttggtaccacgatttttacgcaaatgagcgcgctggcgcagaaacatcaggcaataaatttatcgcaaggcttccctgattttgatggtcctcgttatttgcacgagcggttggcttatcatgtcgcgcagggcgcgaatcaatatgcgccgatgacgggggcgcaggcgctgcgggaggccattgccgataaaacggcggaaatatatggttatcgacccgatgacgtcagtgatatcaccgtcacagcgggcgcgacagaagcgctgtatgcggcgattaccgcgctggtgcgggcaggggatgaggttatctgtttcgatcccagttacgacagctatgccccagccgtggcgctctccggcggcgtgttaaaacgcatagcgcttacgccgccgcattttcgcgtcgactggcaggcgttttcggcgttgcttagcgagcgcacgcgactggtgatcctcaatacgccgcataatcccaccgctaccgtctggcgtcaggcggatatcgaggcgctgtggcaggctatcggcgagcgggaaatttatgtgttaagcgatgaagtgtacgaacatatttgttttgccgccgaaggtcatgccagcgtattggcgcaccctcagttacgagagcgggcggttgccgtttcatcgtttggtaaaacctttcatatgacaggatggaagattggttactgcgttgcgcctgcggccattagcgccgaaatacgcaaagttcatcagtacctgacgttttgcgtcaatacgccggcgcaactggcgctggcggatatgctgcgcgccgcgccggaacactatcgcgcgttacccgatttttaccggaaaaaacgcgatgtgctggttaacgcgctggcgcaaagccgattaaaagtgctgccctgtgaaggtacctattttctgttaatcgattacagcgcagtgtcgacgctaaatgacgttgagttttgtcagtggctaaccgaagaagtcggtgtcgccgctattccgctctctgtcttttgcgccgcccctttcccgcatcagcttatacgtttatgtttcgctaaacaggaatcaacgctgctggccgccgcagagcgcctgtgtaaactgtagttatttaaccgtccacgctctggagaatcgacggtctgcaaaaagctcctgcaggccgttgatctgtttcaggcgcaggacttcatcggcgtccatacctaactcctggccgattttgctctcgtcccagcctagcagagaaagttcgcgcacgatttctgacatggcgtggatctggtggcgcccgcgcgcgcggttatgccgaatggttgccgccatgcgttcgtgacgttctctgtccagacacgttatcggcaggtagcctttcagacgccttttcagggccgcttttcctttgcccagctcatgacggtgaaaaccgtctacaatctcgtactcctccgtattggcctttaccaccacgatcggctgagtaaacccatcttgttcaatcgatttaagcagcagttttttctccggcggcgcaacgttattcgggttgtagtcattaggtgaaatatgatcgtttttcacccacaggacacaatcgacaggctcatcgcgaaaaggactaacgctatgtatcgccattctaaattcattaatggcggcgatcctctcctcttcaggcagttcagagagaaagtgagttatttcggttgtgagtcggtgttgcataagatcccccattcctggcgtttagctttcatacgttcgttataacgctggtaattcttaggttttgtcggactgaatgacagcgcccggcaccagtaatcattgttcagtaatactttgcagatccgtcgccacgacggaatatcgcgcgatccgatatcgccatgctgcgtttgtggaatggtgtgcatgccttttttcttataccactgcaaataaacggcgattttattacggtaatgttcggcagtgacttcaggcatactgtgtagcaggagcagcgcgtactcttcccagttaaggtgatcgggttttaaaattttccggtggccgtaaaaatggctgtcttgtccggcgtatattcctccgctgagtgcgccgctgactctggcgcacatggccgcccagcgctcaggttcgataacatgatacagccataacccctgtcgttgttccgggccgaacggttcgcaaatacgcatgtaacggggcggtactccagcctgatacatcaaattatacaaagggttacatggtttacctgttttggcgaaccaggtccagatatctgcggttttccagtcatagatgggatagatataccaggtgtgccccttaggggctaacgtggtccagggcttatcgtcggcaaagcgcagcttatgcgagttagcgatagcggcaaatcggttataggattcgtcggaacgaataccgaccagcatagcggcaggacgtttttctgaaaaccagtcggcaaaatcgcgaacgaactgttcaaaggtcatgccgtgttgataaaaggaaaaaaaggccggatcggtaatcgcatcttctggcggttgtcgtacccagtcggtacccggctgccaacactgccactccggctggtattgtgaaagggaattttgtgtggttaagggtaatgcgacccaataaaaacgctcaataacgtccgcgtagtattcacgtaacgattcaatataggtgatggtacaggagaattgcgcttcccagtcaatgaagagaacatggatctttttattcattttgcgcgccaacgttgccgtcaggtgcaacataagtcctgaatctttaccaccagaaaatgagacgcagacccggggtaaggtttccagggtccacattatacgctcttgagccgcttccagaacattttgctcgagcggaactttataaaccgacatctctggatagtctccgatgtgttaactacagtatattcgaaataattaacataaaggataagcagattagatgaacttgcaatgctttattatatttgtaaaataaatatattccataaacatatacattaaatttatattaatatccgttatctgaccttcttattaatgtttttttgtgatgtgctcaatgagctcagcaaatccgctattattcagcgaagccctattatacataagatagaattgtatgggagcaatggtaaaaggtatggtgacttttttaagtttgatagaggaagagtaatagtcaaaaaatgtttgtggtaaaaaaccaataagctccgtggagctgatagagttggcgatggtcatcagcgatttgcttctgaaaccaattattctttcccccagcacatcatccataagtgaatgatattctttcataccggttgcccgggagacgagttgcgtaaatgactcttgtagaatttcgtcgatagtggcggtgtcgcctagtcggggatggttttcactgcaaaccaggatgcattctagcctattaaagtgagtacaaacaatagaacgattattcagtggggccattgaaaccacaatatctgctttgcggtaggcaagcagatcttcaggcagttcgtcagtggtcaaaatgtcgtgatgttcaatttcaacctgtggatctttgcggatatatttaactaatttcatcacatattgggtgatcaacagctgtgggctgtagataataaattttttcttcaggctggactgattcattatattaatagtttgttccaggctgttaagattattttctaaatgataatgtaaattaatgcctgttacggtaggcgtaattcctttgcctgaacgaataaatagagggtcgttgaattgcgtgcgcaggcgttgcaatgactggcttacggcagaaggtgtaatatagagtgtttctgctgctttgctaatgcttaaatgttgatagatacattcaaatataaccaacaggttaagatcaaattttttaaggtcgtaaaggttagccatagtatgttcccggcattatcatggtatcttccatgattatgacttaatctcaataatttaccagagttatgtttattaaacttaatgtagagtttatttaaactaaaataccacagttatgaatattttagcgagtaaataattacagtaaaggcggacataacgtacacttttataaccacgccgttagtctaaaaaggctgtgtcggatgacatgctggtctggcgtcgcgttaatgccagtcagaggttggcccgacaaacgtagcgctatcgggcgtggtacggttaagctccagctttgctaatttctgcgttaaggctgccccatcatggcgtccagttgcgctttttccggtaaacccacaacctgttgcaaaatcttatctttattcatgtaataaattgctggcgtcgcgttagcgccaagatcgtccattagctgctgattctgattaatgactttcatctgcgccggggggatggacgccggaacttccagcttcatctttcctgcggaggcttcatagtcatgccaggttttcgccgggtctttcgcggctaaaatcgctgcggctgtggccgggctttccggtttaatcacgccgaccagtaatgtgcgtaattgtaccttgccggattcgacccacggacgagcttgttgccaaaactgcttacaataggggcagaaagggtcggcgaagacatacagcaccaccggcgcgtcttttttaccgtcgagtatccatgacgctttttccattttctgccacatttcacgtccggccggtgcatagatctctttttctatcagggcgttgctaagattttcgcctttttcattatacatatagccggaaatcgcgtgtttaccgtccggcgtcaggtaaatcgtgacgcccatatcctgatactttccgagatagcccttcatgccccccggcgcctcgaaggatttcaggatagttataccctgtttttcaatggctttaaccggcgcaggcagttcttccgcgtgggcgagaatgggcagcatagcaagcagcaatgtacgtttaatcatattttttccttttaatatcaaagcgaaaagagtattaatgatgatgcctatcacagacataggtaagagctggcgtgccaggattgccctttctgtgctggggtgatgtaatccttttcgctgttacagcctttgttaaggtaatgtagagcgcaacacttagccagcatatacgctatggatttcgagttgcagacaatacgtctgtaatttgcaagacgagtcgtactggctctgaagttacctacgggtagttcaggtaatggggccgcctgtcaggcggcctttttactttagatggctgacagggcgcagtgttcacaatgtcgcccgaatcgggttgttagttaacgcttattgatttgataatggaaacgcattagccgaatcagcaaaatttcgttaacttactcctcaacgaaaacacggaggaagtatagatgtccttaattaacaccaaaatcaaacctttcaaaaaccaggcgttcaaaaacggtgaattcattgaagtcaccgagaaagataccgaaggccgctggagcgtcttcttcttctacccggccgattttacctttgtttgcccgactgaactgggtgacgttgccgaccattacgaagaactgcagaagctgggcgtagacgtttattccgtctcaaccgatactcacttcacgcacaaagcatggcacagcagctctgaaactatcgcaaaaatcaaatatgcgatgatcggcgacccgactggcgccctgacccgtaacttcgacaacatgcgtgaagatgaaggtctggcagaccgtgcgacctttgttgttgacccgcagggtatcatccaggcgatcgaagttaccgctgaaggtatcggccgtgacgcgtctgacctgctgcgtaaaattaaagcagcacagtacgttgccgctcacccaggcgaagtatgcccggcgaaatggaaagaaggcgaagcgactctggctccatccttagacctggtcggtaaaatctaaatttccgtcgtctttcacgccatagctgcgttggcgtcgcctgctcaccccggtcacttacttcagtaagctcccggggattctcaggctagccgccttactctgacgtgaaatactttggaaattgtttcagtcatgggcgcacccgcgcccatttcatttcagcaccatgacgcaagttgcattaatgcagtcccgcgaagtcggcttgcatgatgatgttttcagagagggaagaagaatgctcgacacaaatatgaaaacccagctcagggcttaccttgagaaactgaccaaacctgttgagctgattgccacgctggatgacagcgctaaatcggcggaaatcaaggaactgctggctgaaatcgccgagctgtccgacaaagtcacgtttaaagaagacaatactctgccggtgcgcaagccgtctttcctgattacgaatccaggttctcagcaagggccgcgctttgccggttctccgctgggccacgaatttacctcgctggttttggcgctgctgtggaccggcggtcatccgtcaaaagaagcgcagtcgctgctggagcagattcgcgatattgacggcgattttgaattcgaaacttattattcactctcctgccataactgcccggacgtagtgcaggcgctgaacctgatggcggtgctgaacccgcgtattaaacatacggcaattgatggcggcaccttccagaacgaaatcaccgaacgtaacgtgatgggcgttccggcggtatttgttaacggtaaagagttcggccagggacgtatgactctgaccgagattgtcgctaaagtggatactggcgcagaaaaacgcgcggcggaagcgctgaacaaacgcgatgcgtatgacgtactgattgtcggctccggcccggcgggcgcggcggcggcggtctactcggcgcgcaaaggcatccgtaccggtctgatgggcgagcgcttcggcggtcaggtgctggataccgtggatatcgaaaactatatctcggtgccgaaaaccgaaggccagaaactggcgggcgcgctgaaagcgcatgtcagcgattacgacgttgacgttatagacagccagagcgcaagtaaactggttccggccgcaacagaaggcggcttgcatcagattgaaacggcgtccggcgcagtattgaaagcgcgtagtatcatcatcgccaccggcgcgaaatggcgcaatatgaatgtgccgggcgaggatcagtatcgcaccaaaggcgtcacctattgtccgcactgcgacggtccgttatttaaagggaagcgtgtggcggtcatcggcggcggcaactctggcgttgaagcggctatcgatctggcaggtattgtagaacatgttacgttgctggagttcgcgccggagatgaaggcggatcaggtgctacaggacaaagtgcgtagtctgaaaaatgtcgatatcattttgaatgcgcaaacgacagaagtgaagggcgacggctcgaaagtggtgggactggagtatcgtgaccgtgtcagcggcgatattcatagcgtcgcgctggcagggatttttgtgcagattggtctgttgccgaatacccactggctggaaggcgcgcttgagcgtaaccgcatgggcgagatcattattgacgccaaatgtgaaaccagcgttaagggcgtcttcgccgcaggcgattgcaccaccgttccttacaaacagattatcatcgccacgggcgaaggggcgaaagcctcgttgagcgcctttgattatctgattcgcaccaaaatcgcataaaaagaagtaagcacacctgcaaggccagttaactggccatcgtaaatggcccgatagtgtaagctattcgggcctgcggtgtttatgcctggggaacgcaccgggtaaaacaccttcttcattatcaatactctgaaaccgtctgttaataacagacggttttttatttcaacggtattctgtttttaaactttgaaacaataaaaaagccttctacggatttaactggaatttttctgtttttttatcaaagaaagattaagcgcttccgttaacatgcccattcttttttcttgatttatattgcatttgtatgtgaggttatttattcatggattcaatctatgaatcactgacggaattagaaaaaacagggcttacattgcgtgatttttttaattctcatgatagtcgttcactgaaatctgcctacgtgagattaaatcccactgctgcggtaaaccttaccgatcgggcgtggctggaggcggagtatgactttaatgcgctattcgtcggtcctggcaagctgctggctgcgcctttcgcttcagtgtatctggaagatgatgcgctggtgatgggaaaggcgacgctggagatacgggattttatggcagcgttgggattatcggttaatcaggagagcaatatccctgacgatcatatttcctgcgtgctggaattgaccacactattactggctaatacccggcaaacgtcaccataccgctctactctcactcaatatatcaataactatttaacaaagtgggtgccattatatatcgaaaaaataaaaactcatgcacaaacgaccacgttatatacggtggcggacatcttattttattggcttgctgaattaaaacgagaatatcaatatgagtaatgagacgggacatctgaacagacgttcttttttaaaggggatagtggcactgggcgccgttgcggctttacccggaggattactgacctcccgatgcgcgcttgcgcagccgcctgttccctttaaccctaaaacgtacaaaatttatcgtaacgcgtgtccgcgtaactgctatgacacctgtagcctcaagacatgggtaaaggacggggtcattactttcgtggaaggtgcgccggaatcaacatttactcacggtaccccttgcgtcaaagggttaagctatccgcgccgggtttatagccccgatcgtattaaatatcccatgacgcaggacgttcgcggtagcggcaactggcgtcgcatctcatgggaagaggcgatgcagcgcattgccgccaaaatgctggagattaagaaaaaagacggttctatgctcggtctggcgctgaccaaatattccggtaagtttggcgtgctgaactatgccgttgaagggatgatgtcctcgcttggctataccacccgttttgccggtacgccgtgctggcctgccggtatcgacgcgcaaaactacgacatgggcgacatgtggtgtaacgacccggaagatatggtgaaagcgaaatacatcattatctggggcgccaacccggcctggtgctcaatgcacagcatgaagtacatctatcaggcgcgcgagaaaggggcgaaggtcgtggttatcgacccgctgctgtcgcagactgctgccaaagccgatctctacctgcgcgtacggcctggctcagacggtgcgctggcgctgggaatggcgcgtcatctggtggataaaggcctggtggatcaggattttgttaacaacgatgctcacggctatccggaatttgaagcctatctgcgtaaccatgtaaccgtggagtgggcggcagaaatctgcggcctgtctgcggatgtcattcgccagctggcggaagagtttacggcggttaagccggccacggtctggattggttacgggatgcagcgtcatgtcaacggcggcgccaacgttcgcgctatcgatgcctttgtcgctatgtccggcaacatcggtgtcgaaggcggcggcgcgcgttatggccatctgcatacctggggctttaactataacgccatgctgcagaagccgccggtgggcgctattggcataccgggagcggcgggcaccaccagtgaattcggggctgccgctggcagcgacgccgtgcagtactccgatcgctctctgaatatcaaccagacggcgcaggggattctggaggccaacgatccgccggttcgtatgctgtgggtcgcctgtaaaaacccgtttgcccaggatttcgatcgcagcaagatgaaaaaagcgtttgaaaaactggaaatggtggtctgcgccgatcagttcttcaacgaaacggtgcaacacgctgatatcgtgctgcccgttaccaccgcgtttgaagagtggaacgtggatgcttcttactggcactactggctttccattaatcagccggcgattaagccgatgtatgaagcaaaatgcgaccttgaaatcgctaccatgctgtcgcgcaccattaataagatggcgccgggttcctgtaccttcccgcaagagttcgatcacaagcgttggctggatcaggagttcaacgacggtatggcgaaaatgttcggcatctcttcctgggacgatctgctggacgggccgaaaaaagcgattctgccaagttcagccgcctggtacgatcgcaagttcaaaacgccgtcaggcaagtatgaatttaaatctgaactggcggagaaaaacggccacaccgcgctgccggaatacaaaccggaagccgagagcaaactgccgttccatctgtttacgccgcacgtgcagtttggcctgcactcgcagtttatcaacctggactggatgcaggtgttctacccggaaccgttcgtttatatccatccttcttccgcgaagaaaaagggcatcagcgagaacgatctggtcaaagttttcaatggcaccggtgaagttgagctgcgggcaaaagtcaccaccaacgtgccggaagattttctggtgatgtatgaagcgtggttcccgaaacggcagtacaacgtgcaaaacgtcgtggccgatacgcctgctgatatggggctgatgaaaactggcgcgccgggcgccgctatccacagtcagtttgctgacgttgtattgatcggtaaaggggaatccgtagcatgagacgtgcgtttttagtgaatagcgataagtgcatcggctgccgcggctgtgctatggcgtgtaaaagctttaaccaactggagccggatcgcttctggcgctacgtttatccgttggataaagacatctatccacatgaagagcgggcgttttactcgctggcctgtaaccactgcgaacatccggcctgcgtcgccgcctgtccggtgggcgccttgtcgattatcgatttggatgccgatcctgtgcccgataatgcggtgcagtatccgccagggttcccgcatatgccacagcttaatccaggaacgcgctttattctggcgcgccagcctaagcagccggaggacaagtaatggaaaaatatgaactgccgctggtgttttttacggtattaagccagatgtctgtcgggatggctttggtactgacatggcgtacgctgcgtggtgaagtggaaggccagcgtttctattggttggccaccgggctggtgctggcattggcgtctattgccgcgattctgcatctggcgcatcccgatcgcgcttatgatgcgctgattaacctgcgacatgcctggttaagtcgggaaatcctgggcgccacgttgtttggcgcagcggtcggcgtaacgttcctggcaaagggacataaagcgatggctcttatcgcctccgtgttcggcgtgttactggtggcggtgcaggggatgacctacgccgcgccagcgatggtggctatcgctaatggatttaccatgctgttattttttattacggtatgggtcatgggttgcgcggcgattccgctgttaaaactcaggcctgccgttcctgcgttacgccaggggattgtggtgtgtatcgcggtacttatcgcggcgccgctggtgtggttaagcgggggaacggtaatgcagatgacggcgcgttcatggctggcttcaccgttttatctggcaagcctggtctgccttgcgctcgcttttgtcgccagccgtcacggtgattcgcgcccgaaacgcctgttcgtcttgttattcgtcggcgtatttctgagtcggctggtcttttttggcgacacggtgagtactattgtgaatatcgggcatttgtactaacgatgatgcagtaaaaagccctgccaggcgtgacctggcagggcgtgtaagtttttagccaccagagttaacgcacaaccaatacgggcagcgtcgcatggcgcaccacgcttgaggcgttagaccccaacaggtgtgtcgtgatggacggattacgcgaaccgattaccacgacatccgcatccagttcttcgcccatctcattgacgacatcgcgcacgctaccaaagcgaacatgcgttttaattcgtgaaggatcgatactgaagtgtcccaccatcgtttgcagacgcgtttccgcctcatgctgtaaatgttcttcaaagcgacgcacgtcggcggcaaagcggtgcagactcatgctcgcggacccaggcagtacatgcaacagatgaatgacgccatcctgttgcgccagaaactcagcgtggcgaatggctttatcgctaagttccatttcaaaaacatcaaccggcataatgattgtcttatacatacccgttactccctgttaatcaatactgaatttattcaagcatataataatgtttctttctgctatttgtctggcaattttaaatattacggcaacctgatgttaaaaaagttgtgtattttccaggaaaaatcctaaagccgcctgttttgccggcagtctctccgggatagctacccttttatagtcgaacgtgacattcaccgttaccccggaggctgcatgaaagcattgacgtatcacggtccacatcacgtaaaggttgaaaacgtacccgatcccggcattgagcagcctgacgatatcattttgcgtgttaccgccaccgcgatttgcggatctgatttgcatctctatcgcggcaagatcccacaggtaaaacatggtgatattttcggccatgaatttatgggcgaggtggtggaaaccggacatgatgtgaagaatattcggaaaggggatcgggtcgttatcccgtttgtcattgcctgtggtgactgttttttctgtcggctacagcaatattcagcgtgtgaaaacactaacgacggacacggcgcggcgatgaataaaaaacagatcccgccaccggcggcgctgtttgggtatagccatctgtatggcggcgttcccggcggacaggccgaatatgttcgcgtgccaaaaggtaatgtcggtccatttaaggtgccgccgctgttatctgacgataaagcgctgtttctttctgatattttgcctaccgcctggcaggcggcaaaaaatgcccagattcagcaaggtttcagcgtggcggtttttggcgcagggccggtaggattactgactatcgcctgtgcgcgactgctgggcgcggagcagatcttcgtcgttgatcaccacgcctggcgcctgcgtttcgccgaagaacgttacggcgcgataccgatcaacttcgatgatgagaacgatccggcggaaaaaatcatcgagcagacggcaggacaccgcggcgtggacgcggtaattgatgccgtaggctttgaagcgaaaggcagcttgacggagacggtgctgacgaaccttaaactggaaggcagcagcggcaaagcgctgcgacaatgtatcgcggcggtcagacgcggcggcgtggtcagcgtgcccggcgtgtatgccggttttattcacggctttttattcggcgacgcctttgataaggggctaacttttaaaatgggtcaaacccatgttcacgcgtggctgggggaattattaccgcttattgaaaaagggttgctgaagccggaggagattgtcacgcactatatgccgtttgaagaggcggcgcgcggctacgaaattttcgaaaaacgcgaagaagagtgccggaaggttatcctggtgccgggagcgacgtcggcacaagcggcgcagaaacaggcgacgggagtagtcaacccgatgccaggcggcgttgtctgaagcaggcagaaatgaaagggctaacggaaagaggatgcgcaggcatcctctgtgtaaacgcattaacgcttatgcagatgatttaacgcaggaagtcgcccgcggcttcaggctgatattcgagttccagcacttcgagatgggtggaggcgccgcccggcagttcccagtgaatggtgtcgccgacgcgcagtcccagcaacgccgcgccgacgggcgccattaccgaaagctgggtactgctgtccgtcatattggcggggtacaccagcgtccgcacgcgtgtttcaccatcgctcaaattgcggaatttaacgcggctgttcatggtgacgacatcgttcggcatctcttgtggcgaacacatttgcgcgcgatccagttcggcgttgagcgcgtcggcaatcggcagatccgcatacgcaggctgttccagaagacgatcaatacgttcggcgtcaaggtcgttaatgataatagtgggtctggacatttcttactccatgtcatcgatactgcgagtagtgcaggtaaatggtcccaaaagaaaaccctcaccgtctggcggcgagggtttaactctcatgatgatactgagacttaccccgtctttgaagtgatttagttcacattcgggtaaatcctcaaacgtcatagccctgagtgaattttagtctacattcgggcgtgttctcaaatgtggctacggttttaaacctctgcttcgtcaataaccggctttatcgataataaactgtttcccgcagttgccgggatgcggctgcggcaggaatgaggcagaggagagcggggcgttaatcatcgacgcctttaatgaaaactgaatctctgttaaataggcgggattgccatggcagtttactttaacggctttgacattatcctggccccacatttgtgcgacgacgctatcaaactcagcgcggctaacggttttgccgtaattatccgtcagaaactgccccagtgcgctgtcttttatcgccttatccagccgtatcatggtgccgaaataggcattgggatcaaacccgaaacaggcgccatgtttggcatattcgtagcgctccagacaggaattcccccccgcgccgggcatcacttccttaagcgctgccgcgatgtcaggcgaaagtccgggggcggaggctgagcatttccggctggccttgacttcaggcagattcgggattggccgcgtcgcacaaccaaagcgctgccagcgtctctggtcaacaccgcgtgcggcgatagatttgggtaatcctggccacaggccgtggacggtcagaaagtctgctttgttggctggctctttttgcagacggcactcatcgggctcccgatggcggcgttcatgctggctttgacaaaaaccggtttgccaggaaagcgccagcacatagtcagtgaaatcaccgtactgttgcgcctgaagttcgtcggcgttggcggcaaaaatcggggttaagagggcagccagcagcggactgtaatgccatattgtgttcatgatgaattcgataatttatacacattatgaatgttacccatttaatcataaaaaatgccgctcaggtgaacctgaacggcatcatttttaacctgcgttggcgtaatgtttaattccacattgccaaaatcggccagcccaccagcaacagcatcgcgatatagataacgccaaagattgcgccaagccgccagtagtctctggatttcacgtaaccgcagccgtagataatcacaccagggccggtggcatacggcgtcagacagcccatgataccgatagacagcaccagcagaatacacagttgttccatcggaacgcccggaatgcctttacccaccgccagaatgaccggcagcatggtcgcggtgtgagcggaaagactggcgaacagatagtgcgcgaaatagaacaccagtaccagtacaatcacggttgcatccggagagaaaccttccagatgcgtactcatggtattggcgaaccagtcaataaagccggagcgggttaagccattggccatgaccaccagcgtagcgaggttcaccagggtgttccaggcgctgttgtagcgcgtaatatctttccacggcacaacatgcaacgccagcatcagcgagacggccagcagacccacggcagtggcgttgatgatttttccaccaaaaacccacaatcctaagctaagcagcaccaggccaatcagcgtccactctttgcgggacagacgccccatgttttttaactcgccgccagcccaggccgcgacttccgcactgtgggtcacttcaggtttataaagtacataggagagccacggcgcaacgatcagtaaaataatccctaccggcagaaagctgagaaaccactgcagccagctaatctggacgccagcgatcttgctgacgaactccagacctaatacgttcggggccgcgccagtgacaaacatcgaagagctcaggctggtactgatcaccatcatccacatcaaataaccgccgatgcggcgtgcggaaggatcgtttggaaacgatttaaacagcggcggcaggttcttgatgaccgggaagacagtcccgccggtacgagccgtattggagggagtaaacggcgccagcaaaatatcgataatgacaatcgcatagccgagcgtcagcgtgcgtttacccatgaattttaccaaaaacagcgcaatgcggcgccccagcccggtcacttcgtagcccagcgcgaaaataaacgcgccgaaaaccagccagaccgtggtgctggagaaaccggcaagcccccatttcagcgcctgtttactggctttaaacgccggatcggccagttctgaagcgtcaaatagcaggtaattgctgccgataacgcaaatggttacggcgataaaactgatcgctgtcgccgggatcggctccaggatcataccgacaatcatcgcgacgaaaaccgcaaaatagtgccaggcctgcggcggcataccatctggaacaggaattaacaacatgacgcccatcaccactaatggggccaacaacttccatatattatctttggataaagacataaatgactctccggaaaggatattttctataattgtgttaatgattaacttgcgaaatttgcgctaaaaaccaggtcacgatcagcagatcggcgctaccgcctgggctgagattgcgttcaatgcattgctgatcgaaccggtggagataaacgagatcgtcaggcgtccgtatgccgccctgctgtaataagaccgcagcctgctgctgtaaccagcgcagaccgtccgccccgccgcgcgacgcgacgttggtatcgccgttaagcgacatcagcagcagtaaggtatcaagcagcgccagttcgggatcgcgcccctgcgccagcaatgcgcggtagtgcggcaacgcgtggcggatgaccagcggatagcccgcttccgcttcaccgcgcgcgccggttaatcccagttgctgatacagccgctggcctgcggtgagctgtaggttgttctggcgcagttcgcgcgttgtcaggccgcggcaaaaatcggcggcggtagcgcagagtgtttctgcggcgatcggctggcgtagctgatacaggcggccaatggcggcgcacagtaaccccagcgagaaaatgctgcctttatgggtattgacgcccgccgttgcgcgaaacatcgctgcttcacagtccatccccaatggacgcaggcccgccagaactgactctggcggcaggcgcgtgcagctggcgccatattccataaagcgcggcagccagtgtcgaatcgcctccgcgctgcggtgaaaatccgccagcgccatatctttgtgcgcgccgcagtttagtcggtctaccagaccgggttttggcgataaatttacctcggtcagcatggcgcgccaggccaaatcggcccagacgtcatacagcgactgaggctgaatggaggcgttagtcgggttggcgggaatcggcatcatgcagcagcgcctccatatgaatcagtaaatcagtcagcgcgtgggttttaccccgcgcgcattcagccgcgctttgcccgcacagcagacagcggcgagcgggaagcgcgaaatggcggcgggagagtatttcgccttccgccgtcaggacatcgatatcccacaggcgccccagtggataacgctgttcaagcgcgatggtcgcctgtttgagcgcctgagcgggcgcgtcaatcgccagcagcccttccggcccgctggcggaagccagtgcagcctgctcccggatagtccagccatactcttctgccagcgtgtgcagggcagtcacgccgtgattaaagatccggcgggttaacgcgctgtcttttatcgggcctggcgccaccacggtaaaggagaccagtggagtggcgtggcgcgttagccaggcgcgctgtcttgcttgtctctcatcccggctggcgagcagctcaggaatagaaacgtcgtgacaggtggcgagttcaggaaacaggcgcatggcttattccttcacctgatgcaccacatcgatcactgaaccgtcgcgataacgcacgacagcaatcacgcggtcggtgaattcgatagggcggggctgaccggtaagcagttgcgcgcgttcgcgcagccactcaatcgataccactttcattcccgctgctttcaggcgttcagccagctccggacgcgccggattgacggcgataccgtgatcggtgaccagaatgtcgacgctggagcccggtgtgacgcaggtggtgacgttatcaaccagcgttgggatgcgaccgcgtaccagcggcgcgacgatgatggacagcgccgccgcgacggcggtatcgcagtgaccgccggacgcgccgcgtagaacgccgtcggagccggtcagcacgttaacattgaagtgggtgtctacttccagcgcgctcagtaccaccacgtccagacggtcgacggaagcgcctttagagccccagttggcgtactggttagcgctgatttcgatatggttcgggttgcgagccaaagattgcgcagcgttacgatcgaagctctgaacgtcaagcagtttgcggattaagcccttttcatgcaggtcgaccatggtggcggtgataccgcccagcgcgaaattagccacaatgttgcggctacgcattttgtcttccaggaagcgggtgaccgccagcgatgcaccgccggtgccagtttgtagggagaaaccttcgttgaagtagccggagtgagcaatgacttccgccgcgctgcgggcgatcagcagttcacgcggattagtggtcatgcgggtcgcgccagcgccgattttgtttgcatcaccgacttcttcgatttgcacgatcagatcaacctgatcctgagcgatgcttgccgggttatgcggatacggcagcagttgctccgtcagcatcacgacctgcttcgcgctgtcggcatccaccatcgcgtagcccagtgaaccgcaacaggctttgccggtataaccgttagcattaccgaattcatcgcaggagggcacgccaagaaatgcaacatcaatattgagttcgccgctttgtaccagatgtacacgaccgccgtgggagtgaatctgaaccggctcagccagcaagccgcgagaaatttcttccgccagcgggccgcgcaggcctgacgtgtagatgcggctgaccaccccgttacgaatgtgttcaaccagcggcgcatggcagtcgctcagcgaactggaggccagcgtcaggtttttgaagcccatcttcgcgatggtttccatcaccaggttaatcgtcagatcgccgccgcgaaacgcgtggtgaaaggagaccgtcatgccgtcgcgtaaaccggaacggcggatggcctcttccaggctggcgcacagtttgtggtcgcgcggtttttgcgcttgtagatccaattttgccgcactttggtaagcgctcagttcgctttcagcgtgacggctccaggctgctacgcgatcctggcgttgagattcatttttctgcgtcatttttttgccttattcttcgcgaataccggaaagttctgcacgggagagcaccagacgggcgcgttcaatcaccgggctgtcgaccatcttgccgttaagggaaacgacgccgagaccttcgcgggcggcggcttctgcggcttcaacgaccagacgcgcatgggcgacctctttacgcgttggcgcataaaggttgtgcagcagttcgatctggcgggggttgatcagtgacttaccgtcaaagcccaactgtttaatgtgggcggcttcttgcaggaaaccggcttcgttgttggcgtcggaatagacggtatcgaaggcctgaatgccggcggaacgcgcggcctgcaaaatggcgcagcgggcgaacagcagttcggtgccttccggagagcgttcggtgcgcaggttgcgaacatagtcttccgcgcccagcgcaatcccgatcaaccgttcagaggcgtgggcgatttctaccgcgcgggtaatacccagcggcgattccacggcggctaacaggccggtactgcccggttcgcgaccgcaggcgttttcaatgcgcagaatttcgttttcgatatcaatgacgtcctgcgcggtgtcggttttcggtaaacgcaccacgtccgcgccgccgcgcacgaccgcttccagatcgttgacgccccattcggaatccagcgcattcacgcggacaatggtttcgacgtcacggtaaagcgggtgttgcagcgcgtgatataccagacggcgcgccgcgtctttttcgcgtaatgcaacggagtcttccaggtcgaacatcagcgcgtcggccgggtagataaacgaattgctcaccatcgccgcgttggcgcccggtacgaataacatactgcggcgggtgcgggttttacgttgttgcagagaggcggaaatcattggcgatcctcccagggcagagcggcaataccgctggcgcgcgccagtagcgtttccagtcgggcgcgcaaaatgcagtccagagcgcctttatcatcgacgttcagttgtacgccgcgcacgtcgtagcgagaaagcacctcctggatggtggcgcgaatggcctcgccaaactgtttttcaacgctactgttgatttgcaggtcaatatcctgcgtatcgagcggcgcaatgcgtatcatcacatcgccggactcaagcgtgcctgcgacggctagctggtttattttcatttttcacctgttgctaatacgggggacttttgacgggctgccgcgctgcccggatggcgttcgaccatgccctgcaaatagcgcagggtggcgtcgggaaccagcggcgcgatagccgtgagatcgtgtttaaccagcagcttgcgtacccaggaggcggatatcggcgtctcctggaagcaaagccgctctatttccaccagcgtaatgggtggggcgggaagcgttggcgtctccagccagaaacgcatatcaaggttgtactgggcggtaacggtgcaaaacggctccgtaccgacaaagcggtgtgtgatgccaagcgcgggcgccagatactggcggaaaatcttcaggtcgatttcggtataacagtgattaataacgctctgctctttaatgaaatagcaggggaacgtcgcacgagaaataatgtattcggagccgcggtgaacggttaagcgcgggatatcggtggtccctttaaggaccagatcgagtcggtcttcatagggaaagcgtgatgtatcttctttgaccaggaacagatgcagccagtcgcactgtgccgccgcctgttggatcagatagcgatggccgttcgtgaaaggattggcgttcatcacaatacagccaattttctttccctcatgacgcaatgtcgccagcgattccgcataccgtttcaaccgggtcgcgctattttccattaagaccattacgccagggacgctggctatcgtcgaaaagctgcactgtttaaacagcgcttcgtattccgttttggtataaataaaaagatgggtgcagtgccgctcccaggcgagattaatcaattccgtcgccagcgttaacgctaagccttcgccgcgtactgattcgctaatggccacgcatttaatgatatttccggcaataccgccgcaggcaataagacggtcatcacggctgacggtaataaacacttctacagtggtatcgacgcttaaatcattctctttgagaaagtgagcgatctccgccatttttttattttcagagcgttttacccgagtgaatacattattgccaaacatagtaagaaatatcctggtgatatgcttgttgccacttttctgtatatgttgcgctgtgttgcaacttgataactttttcttttcagtcagagtaggagtttttttatgacgagttatttatttttctctctgacgtatacatcgtaaggagtattttggtggtaaattttgatttatttcacaaagcgttagatggtttttaagtgttttatggttttaagttttttaattaatttaatcgccattccggcggtgggttttagttgtttaattgatttaatgtggggaatctgtaacgattggtttttatatgcttcaagatgctcaaaacatttttattacatttgcgataaatctgaagagaaatgcccataaggaaccttaatgtcctgtcagaaaaataaaaagctgtttcctttttttcggcaactcgcgtttccgttacgtatttttctgctcattctggtggtttctgttttcatcgtggcagcgttagcacaatatttgtctgccagtttcgaagattatctggcgtcccatgttcgtgatatggcgatgaatcaggcaaaaattattgcttctaacgacagcattatcgctgccgtaaaaaaccgggactataaacgcctggcgataattgcgaataaactgcagcgcgggacggattttgactatgtggtgataggcgatcgccactcgatccggctttaccatccgaatccggaaaaaatcggctatcccatgcagtttacgaaacccggcgcgctggaaagaggagaaagttatttcattaccggtaagggctcaatagggatggcgatgcgcgccaaaacgcctatctttgacaacgaaggcaacgtgatcggcgttgtttcaattggctatctggtcagtaaaatcgactcctggcggctggacttcttattaccgatggcgggggtttttgtcctgttgctggtggtattaatgctgctttcctggtttttcgccgcgcatatccgccgacaaatgctgggcatggagccgaaacagattgcgcgcgtggtacgccagcaggaggcgttatttagctcggtttatgaagggctgatcgccgttgatccggagggacatatcaccgcgattaaccgcaatgcgagaaaaatgttggggctgccgtcgccggggcgtcagtggctgggcaagctgatagcggaagtcgtcaatccggcagacttttttacctgccagatcgcagaaagacgccaggacgtgatggccaacttcaatggcctgagcgtcatcgccaatcgtgaggctatccgttccggcgaggagctgctgggcgctattattagttttcgcagcaaagatgaaatcgcgacgttgaacgcgcagctaacccagattaaacagtatgttgagagcctgcgcacgctacgccatgagcacctgaactggatgtcgactctgaacggcctgctgcaaatgaaagagtatgatcgggtcagagagatggtgcagggtgagtcgcaggcgcagcagcaacttattgatagtttacgcggcgccttcgccgatcgtcaggtggccggtttgctgtttggcaaagttcagcgcgcgcgtgaactggggctcaagatggtgattgttcccggcagccagctacatcaactgccggaggggctggatagcacggagttcgccgccatcgtcgggaatctgctggataacgcgtttgaggcgagtttacgtacacaggaaggcgacaagaccatcgaacttttcctgagcgacgagggcgacgaggtggtaatagaggtcgccgaccagggctgcggcgttcctgaagcgctgcgggaaaaaatttttgaacagggcgtaagtacccgaaccgacgaacccggtgagcatggtatcgggttatatctgattgcaagttatgtggggcgctgtggcggggtcattacgctggaagacaatgatccttgtggcaccttattttctttattccttccgaaagtgaaaaaaaacgatgacagaaccattaaccctattgatcgttgaggatgaaacgctgctggcggagatgcacgcagaatatatccgccatattcctagctttaaccagatatggctggcgggcaatctggcgcaggcgagaatgatgattgaccggttcaaacctggattaattctgttggataattatctgccggatgggaaggggattacgctgctgcatgaattaatgcagtcgcgctatcccggcggcgtcgtgtttacgaccgccgccagtgacatggagacggtagcggaagcggtacgcagcggcgcgtttgattatctggtcaaacctattgcttatgagcgtttggggcagacgctgacccgctatcaacagcgcagacgtatgctggcgagcgcggatagcgcaagccagaagcagatagatgaaatgttcaacgcctatgcgcgcggcgaaccgaaaggggatttgccgaccggtattgatgccttaacccttaatgcggtgatgaggctgtttgccgatccaaccgtacgccatacggctgaaacggtcgcgcaggccttaacgataagccgcaccacatcccgacgctacctggaatattgcgcgagtcagcatctgattgtcgcagagattattcatggcaaagtgggcaggccgcagcgtatttaccacggcggctaagcctggtttaagatgccggggcgatgttttccctcgccccggcttaccggctatcagccgccagtaacgctggaagaggcgcctggcaccataatttccgtggcgataatgacgatcaacagaccgacgataaccggaacggacgtgcgcttcaccacttcaaacggtgatattttagccatcccggcgacagcgaccacgacgccggagaccggcgaaatcgtgcgccccaggtttgaggcttgcagcattgggatggataaataggctgggttgataccggaggagtgcgccagtttagggatcatctcaacaaaggcgtaaaaaggcgcattgcctgaaccggtggtcatcgcggccagcatggttaaaatcactaagaccagcatcagaataatgctggcggagccaaaagaagtggcaatcgagatcagactttggataaagccaatggtgctcagcccctgggcgaaaacgcccgccgcgaccaacagcatcacaacgccggcaaacgcatccgccatgccgcgataagccacttccaggccggaaaacacattttgcgtgttgaaaccgcgcacgaattccagcacggcggccagcagcatacagatcaccagaatggtaataatgtgcaactgcggcccccatttaccgtcaaaaatcagtacgccgataatgggcgtgaacggcaaaagggcataaaacgccggggccgtggtggtaatctccgccacgtccagcatctcatgtgaaatgttctcttttttatccagatagcgttgccagaaaaagtgcgcaatcgccataccgataatggcggcgatggaaattggcagcgtagttttgaacgcgaaatcgattaacggcatctccgccgcttttgcggctaaaaccacatcgccagacgttggcgagaggatgatggcggccggagaggcgcaaatagccgccgccgcgccgcggctaatgccgacgttgaccatcaccgggaagagagtagccatgagcagtacgccaagccccgtcgcggaagagacggccagcgacatcaggcaggcgacaaaataggcggcaatcatcaacaggtagggcgagtttatgtactgtaaaggtttcgacgccagcttcacgaccatatcattcgcgccgatatgcgtcatataggcggcaaagccgcacagcatcatgatcatcatgccaagatcgccgccgcgactcataagcaaaattttgatgtattcaacaatatctgttgcggtatagccggtactggtttcgctggcaggtaataccttatgccccatcagcgcgctgataataagcagagccagaccgccgacaaataaaacgccagtggcggaatatcccttaatgatgtagcgcgctacacccacaataacgacgactccgataaggagctctataactgttagcattgtttcccctgtcttatcgacacccagagtaaaaataagaaccacaaaagtggtataaaaatgtaccgaataaaggatggcgccttactgattaaaatcacggcgcggttattttttcatgtcattgctaaagatgaaatatacttatacgaattttctgtagcactataagtattaatttattgttattttattgttttatttgttgtgctttgttttgtgttttttgtgaaagcttattaaggagcgcgtgacggttctgagtgctaaatcaaacgccgttaacccgatactctctcagattattctctgtttatagtttgttaagattttattcaggttaatgttgttattatcacagtcgaatttttgaacggtatgtatgttgcgatgatcatcagaaagtattttcttattattgctctccttttgatgccatggctggctattccttcagtctctgcggcggataaaggggggtttaacacgtttaccgataacgtcgcagaaacgtggcgacagcctgagcattatgatttgtatgtccccgccattacctggcatgcgcgctttgcctacgataaagagaaaacggatcgctataacgagcggccgtggggcgttggttttggtcagtcccgctgggacgacaaaggcaactggcatggcctctatatgatggcctttaaagattcatttaacaaatgggaacccataggcggttatggctgggaaaaaacctggcgaccgctggaagacgataattttcgccttggactgggctttaccgcaggcgttaccgcgcgcgacaactggaattatattcccatccctgtgctgttgcctttagcgtcgataggctatggtcccgctacctttcagatgacctacattccgggttcgtataacaacggaaacgtctatttcgcctggatgcgtttccagttttgatggggaagggtatgcttcagttgtgaattaaaaagtcttaaaaaacaataagtagatagagttagctaaaaattaacgcgatatttatcactttttcgcaaagttcgactggacaaaatgcatcacaattgttgtactggtatccgacacagcatttgtgtctatttttcatgtaaaggtaattttgatgtctaagattaaaggtaacgttaagtggtttaatgaatccaaaggattcggtttcattactccggaagatggcagcaaagacgtgtttgtacacttctctgcaatccagaccaatggttttaaaactctggctgaaggtcagcgcgtagagttcgaaatcactaacggtgccaaaggcccttccgctgcaaacgtaactgctctgtaagcatacgtccgacagcaagatttcaaaacccgccctttcggcgggttttttttgcgcttaacgcgccgctgcggcggaaaatagccagaatgccagcgccgtcatggcaaacgaacctaacaggttaatcagcacattcagcagcgcccagccaaagcgcccctcttgcagcaagaataccacttcggcagaaaaagtagaaaaggtcgtcaggccgccgcaaaagccggttgtgatgagcactttccacatcggatcgatatgtgtcatgcggttaaaccaggcgaaccccatgccgataataaacgcgccaagcaaatttgctgttagcgtaccgatgggaatcgcctgatgaagcggattaaaacgcatactgagcatccaccgggctacgctccccgttccaccgccgataaaaactgctaaaagaagctgtaacactgccgaatcctttatttaattgctatacaagaggagtgtaacgccgaacacgcataattggcgagtcctgacagaggtgtgggaggggatatgttcgttgcagccgggcagtttgtggtgagttctgtatgggaagagaatgcgcaagtttgcgtttcgttaatggctcaggcggcgggccgcggcgtatcgcttctggtgttgcctgaggggatattagcgcgagatgacatcgaccttgacctgccgattcgcgccgcgcagccgctggatggcgcgtttatgacgcggcttctggaagaaagcgctcataataatatgacgacgatattcactatccttgtcccgtcaacgcctggacgggcggttaatatgctggtggcgctacgggcgggtcacattgtcgcgcgttacgcgaagctgcatctctatgatgcgttttcgatgcaagaatcccaaagtattgatgccggaaccgttatcgcgcctgtgctggacgtggagggggttaaggtggggcttatgacctgttatgacctgcgctttccggacatggcgctagcgctggctttacagggggctgacgtattggcgctgccgacgggctgggttcgcggcccgttgaaagagcagcagtggtcgacgctgctggcggcgagagcgctggataccaccagctatatgattgcggccggggagtgtggtaatcgtaatattggtcaaagtcgtattatcgatccgttgggggtaacgatagccgcggcagccgatcgtccggcgctgatcgtcgcggaaatattcagagaacgaatagaccaggtgcgggagcaacttcctcttttgcagcaacgacgatttgcgccaccgcaattattatgatgtttttttacgcaaagcttgattcaccttgttacagattgctattgtgtgcgcgcgtcgaaagaccgttaatattctcaggttaatccggcgcgttacgcagcctgtttttagtgaagaaggtatctatgggtgagattagtattaccaaactgctggtggttgccgcactggttgttctgctgtttggtaccaagaagttacgtacgctgggcggagacctgggcacggcgattaaaggattcaagaaagcaatgaacgatgaagacgcgggcgttaagaaagacgtcgacggtagcgttcaggctgaaaaactctcgcacaaagagtaattgcgcgatgcgcttgctccgcagagtaaaaaaaccggcgagttgccggttttttttgcctgaaatgtaagcgtctattacacgatcatttcacttccatgcctttggcctggagatcagcatggtacgaagaacgtacaaaggggccacaggcggcatgggtaaagcccatcgccagggcttccgctttcatctcgtcaaactcttccgggctgacataacgctgtaccggcaggtgatggcggcttggctgtagatactgaccaagcgtcagcatggtaacgccgtgacggcgtaagtcgcgcataacctcaatgatttccgcattggtttcgcctaagcccaccatcagacccgattttgtcggaatttccgggtgcgcttctttgaagcgttccagtaatttcagcgaccagttgtaatcggcgcccggacgaacctggcggtaaatacgcggcacgttttccaggttgtggttaaacacatccggcggcgtcgcgttaaggatatccagcgcgcgatccatacgtccacggaagtctggcaccagggtctctatttttatctccgggcttttggcacggatggcggtgatgcagtcagcaaaatgctgggcgccgccgtcacgcagatcgtcacggtcgacagaggtgatgaccacatagcgtagcgccatgtcggcgatcgtttgcgccagtttctgcggctcttccgcatccggcgcaacggggcggccatgggcgacatcacagaacggacagcggcgagtgcaaatggccccaaggatcataaacgtagcggtaccgtggttgaaacattcagccaggtttgggcaagatgcttcctcgcagacagaatgcaggccatttttgcgcattgcggctttgatgccctggatacgggtagaatccgccggaagttttattttcatccattccggtttacgtagtagagcgtcgcgctctgtgaccacatttttaaccgggataagagccatcttatcggcatcgcggtattttacaccgcgttccatcacaatgggtttactcatagcgtgcgtgttccagttgcgaataacgaaggaaagcgtttcaattcaagggaaagttgtatttatcaactatttttgaatttgtgacacgcagtatatcattgataagggccataaagcagcctgacagcccggcaaaatgtaaaatagttgttgttttgtgctgtttgcccatatcttccgtgacctgaatgcaacatttttgtcagaacgcctcacggatgatatcaatgacgttctccagcaccggatcgcgcagactcagtttattgtaatgcagcgagaactcgacctgttcactattcaccggcgcgtagggaaggcgctcaagcggccagcagcggctaaataagtcgtagaagcgggtgggcatcagtcccagcagatcgctgctggcgatcagcgaggcaatggtaaaaatattgtagctgctaaaactgatttgctgatcgggaaatgtctcctgcagtcgctggcgcagcagggaaagatgttgtccctccagcatcagaaaggtgtgatccgcgctgttcagtctctcttcagtaatggcgttcgccagacacgggtgatgctggcggcagacaatctcaagcgtatcgctaaacaggacgtgatgctggatgctccggttgttatagctatgggtattgataatgagatcggtctgaaactgactaagctggctttcggcatcgtctaccggaatgttgcgcagcaaaagctgaggataacgcggcctgatggcctggtaaataatcggcatcactagcgcgccgaccgaaggcgtcgtgccaattgtaatggtgcgttgcttatcatagctgcccgtaagatccagggcgccaagaatagattccagcccctggctgatgtattcgtgcagatgcgtagcatacgtcgtgggcgttacgccctggcctttgcgaataaacagcggatcgggaaatatagtccgtaatttttgaatggactggctaatggctgacggcgtcaggttaagaattttcgctgcattgacgatccctttatggacatatacggcctcgaaaatcgtcaacagattgaggtcaatatttctcagtgttctgaaaatttgcggtttgtcctgtaggtgttgatcggccggttgtctttctgcctgattattatcactcacgctctggctccgaattcattcgtattatgaataatagatgaaatagtatattttgcatttatgggttggttttaaaattactcttatgaatgtatttttagtcatttcaataagataagtaacagcaaggccgggattttgttcacggaaaattcctcatcatgaggactgaagaggccatgccgcctggcggctacagcagggatataacgaaaatatagaaagcggggggagaagtaaagcattcaaatcatatatgattaatgacccataaatttcttgggccattatattttacgcattaagcagcaatatattcatacggtggattatttagcagagctaaaatattcgccagcaagcggggcgcaatattatccgtggtagcatcttccttccactgcgttattttggccatttccatgccggcataaccacacgggttgatacgcaggaaaggagaaagatccatgttaacgtttagcgctaaaccgtggaatgagcagccgcgacggatacgtaaacccagcgagcagattttcttttcacccacgtagacgcccggcgcatcggcgcgcggatgcgcctcaataccaatttcagccagcgtattcaccacggtctgttcaagtagggtgactaaatcacgcacgcccagtttacgtcgtttcaggttaagtaaaacgtacattacctgttggcccggaccatgataggtcacctgtcctccacgatcgctctgcacaacgggaatatcgccaggcatcaatatatgttccgctttaccggcctggccctgggtaaacaccgggtaatgctcaaccaaccagatttcatcatggctgttttcatcgcgcatatcggtaaagttatgcatggcctgagagatagcttcatagggctgaaggccgagctggcggacaaggattttatcctgatacaaaacggcatctccgtagagaatgaaaaaagagaggaaagtatatcacagcgggggaggcggggagttacccggataagaccgggtaaccgtctggatgtattacaataccattcgcacgatatcaatattgcccagttcttcgtacagcgtttcaacctgttcaatatgggtggcattaatggtgatagagaccgagtggtagttgcctttgctgctcggttttaccgtcggagagtaatcaccaggcgcatggcgctgtaccacttcaaccacctgatcaaccagctcaggtaacgcctgccccattactttgtaagtaaatggcgtagggaattcaagcagttcgttaagtttggttttcatgtcagctccggcattacgtaaaaaaaataacaactcccgccacagggcgggagttttactgatgcatagtatatggggacgaaaatcacactttcaagcgttcaatttttatccaaaccagtgatggaacattaatttaatgtaatcaatgattttaccgaagaagttcccttccgggatctcttgcagtacgaccagcggacgctgctcgatggttttaccgtccagctggaagttgatggtgccgaccacctggtttttctgcagcggcgcgtgcagttctgcggtattcagtacatagctcgctttcaaatctttcatgcgaccgcgagggatcgtcaggtaaacgtctttatcgacgcccagcgaggcgcgatcggtattaccaaaccaggcgggttcagaggcgaactctttaccagccttcagcggattaacggtttcaaagaaacggaagccccacgtcagcagttttttgctttctgtttcacggcctttataggtccgtccgcccatcacggcggaaatcaatcgcatctggccttcggttgcggaagcgaccagattatagcccgctttgctggtatggccggttttgatgccgtccacattcaggctgttatcccacagcagaccgttacggtttaactggcgaatgccgttaaaggtgaactctttttctttataaacggcatattcgttcggcacatcgcgaattaacgcctgaccaatcagcgccatatcgcgagctgaactgtattgtccgtcggcgtccaggccgtgtacggtctggaagtgggtatttttcagccccaacgcgttcacatagctgttcatcagcccgacgaaagcatcctggctaccggcggcgaaatcagccatcgccacacaggcgtcattgccggattgcagattgatgccgcgtatcaactgagagaccggtacctgcattcccggcttgaggaacatcagcgaggagcctttaaataccggattgccggtggcccaggcgtcattaccgacggtaaccaggtcggtttctttaaatttacccgctttcattgcctgtccgatgacgtaactggtcatcatcttcgtcagactagccgggtcgcgacgttcgtcggcgttttgttccgccagaactttgccggagttgtagtcgatcaggatgtaggattccgcatcgatctgcggaacgcccgggatcatagttttgatattcaggtcatcggcatgtgcggttgagataaacgcggcacaaagcgccgtggtgagcgccatgcgctgcataaaacgagcggaaaaagtggtcttcatggtctgaactacgacgtccgtgatgaaattaaaaaaagagccctactatagcaaaagcataactggcaggcatctgactttccgcgtgactttgttaatgtcatttacagaaattgacagtacagatacctgcgatcggttactgcgcgctggcgataaaggactgtaattgtgcttctgtttgcaaacgttgctgtaacgcgctggcttcggctttactggcaaaaggccccagttgaatacgccagaccgcgccgttttgtattacgcgtcctggtacgctgaactgctggcttaaacgctgttggtattgctgcgcacgcgtttgatcgctgacggcgccgacctggacgacgaaacgaccgctcgccgcggcggctggcgcactcaccggggcagataccggggccgcggcagcaggcgcgcttaccggcgtcgcagtcgctggagccgtcgctggagccgccaccggcgcggaaaccggcgctggctgtggcgccggcgtcggttcattactctccagcacgccaggcgccagcgtagtcggcgcgccgaggaagccgctgctgctcaccggcgcaccggtggtatcgtcacttttcaacgtggaattactgaccggaagaacgtcgccttgcggttgtgcaggtgctgaagaggcgcttcccattccgccgcttaaatcagggcgcgggggcagagcgtaggtctgtttcgccaccgtcgtacaggccatccccgggccggagagcgaaccatccggcgccacgataatggggtcaatccgtactttagtattattcgaggtattcagacgatccgccgctgcgcgggacagggagatgacccgatcggtgccataggggccgcgatcgttaatacgcacgacgatcatgcgaccgttggccaggttggtgattcgcgcatagctggggataggcagtgtcggatgggcggcggtaagctgcatcggatcgaacatctccccggaggcggttaaattactgccgggttccgcatcataaatagcggccaggccagcctggctaaagcgggacgggtcctgaacgattttataacttttaccgtcacgctgataatcctggtttgcggtcggattcagaggttcataacgcggttccgctccgctgatttccacagtcggaccattacataccgcaggttgcggcgcgacggtggtttgctgctgaccgccgtcattagtacatgccgcgagtagtactatccctgccgcgacgcagattacaggcaactgcttacgcattgcgcaccccttatacgcttttcgacaacatttttctgtgggtgtggatcgacatcacaatcccgaacccggccatcagcacaatcagtgcggagcccccgtagctgaccaggggtaaaggtactccaaccacaggcagaataccgctcaccataccaatatttacgaagacataaacgaataatattaacattaatccgccagccatcacgcgaccaaatgtagtttgcgctctggcggcaatccacaagccgcgcattattagcaaaatatagagcgcgagcagaatcaggatgcccaccagaccgagctcttccgccagtaccgcgaagataaagtcggtatggcgttcgggtaaaaactccagctgcgactgggtgccgtggagccagcctttaccgcgcaggccgcctgagccaatggcgattttagactgaataatatgatagcccgcgcccagcggatcggtctccggatcaaggagcatcatgacgcgctggcgttggtaatcgtgcatcaggaaaaaccacaaaataggaataaatgcagcgatcaatacaatggcgaccccaattaagcgccagctcagaccagacaaaaataggacaaagagaccggaaagggcgaccagaatagacgtccccaggtccggctgggcggcgaccagcagggtaggcataaagattaataccagggcgatggcggtatttttcagcgagggcgggcagacgtcgcggttaataaagcgggcgaccatcagcggcacggcgattttggctatttccgaaggctgaaagcgaacgattcccagatcgagccagcgctgcgcgcctttggatattgcgccgaaggcatcaacggcgaccagcaaaatgatacaaatgatatagagatagggcgcccagccttcatacacgcgcggcgggatctgcgccatcaccaccatgaccaccagccccatcgcaatctgaccgattttacgctccatcatgccgatgtcctggccgctggcgctccagatgaccaacgcgctataaaccagtaacgccagcagaatgagtagcatcgtgggatcgatatgaattttatcccagaaggtttttttgttcggattatccgtcatgattattggtcctccgccgctgcaaccaccgggttttccgcaggcaaatgggtgttgttgtcgcccagcatgatgtgatcaaggatttggcgcatgatcgtgcctactgccgggcctgcgccgccgttttcaaggatgatcgcgacggcgacctgaggattgttatacggcgcaaaggcggtcatcaatttatggtcgcgcaggcgctcggcgattttatgcgcattgtacgtttcgttggccttcaggccaaagacctgcgcggtgcccgacttcgccgcgattttatagggcgcgctggcaaaatatttatgcgccgtgccgttagggcggttggcgacgccatacatgccatctttcgcaatttcccagtagccggagtgaatatcgcccaccggcggctcatgcggctgtacccacggcacctgtttaccgttttccgcggtgctcattaacaggtgcgggactttaactacaccgtcgttaataaggatcattagcgccttactcatctgaatcggcgtcgctgtccagtaaccctggccgatgcccaccggaatcgtatcgccctgataccacggttttttaaagcgtttctgtttccactcgcgggtcggcatattaccagagcgctcttctgcgagatcaattccggtgtagtgaccatagccgaacttacccatccattctgacaggcgatcgatccccatatcataggcaacctgatagaagaaggtatccgccgactcttcaagggatttggtgatattcagatgcccgtggccccattttttccagtcgcggtagcgtttctcagaccccggcaactgccaccagccagggtcgaaaagactggtgttacgggtgatgacgccagcgcttaacgccgatacggcgacgtaaggcttaacggtagaagcaggtgggtagacaccctgagtcgcgcggttcactaatggcgtgttcgggtcgttaagcagcccggaataatctttgctggagatgccatccacgaaaaggttagggtcgtaacttggcatggagaccagcgatagcacgccgccggtacgtggatcggtgacaatcaccgccgcgcgactgcctgccagcagcgtttcaatatactgctggagcttgagatccagcgtcaggtagatatcgtgtccggcctgcggcggcacctctttgagttggcgaataacgcgaccgcggttgttgacttcaacctcttcataaccggtttgcccatgcagaatatcttcatagtagcgctcaatgcccagcttgccgatgtcatgggtggcggcgtagttcgccagtttgttttctctgtcgagacgctcgacgtctttatcattgattttcgatacgtagccgataacgtgggtcagcgccgatccgtatggataatagcggcgtttatagcctttgacttcgacgcccggaaaacggtactggttgacagcaaagcgcgcgacctgaacttccgtcaggtttgttttcaccggaatagaagtaaagcgatgggatcgggcgcgctcttttttaaaggcggcgatatcgtcgtcgtttaaatcgaccacactgcgtagcgcatccagcgtttgctgaacgttatccaccttttccggcatcatttcaatctgatagatagtgcggttcagcgcaaggggaatgccgttacggtcgtagattatcccgcggcttggcgcaattggcaccagcttgatacggttttcgttcgagcgggtctggtaatcggtaaaacgaaggatttgcagattatacaaattggcgatcagtacgccggtcagcagcaaaatacccaaaaaggcgaccagcgcccgacgcacaaacagtgcggactcagccgtatagtcacgaaaagaattttgtcgtttcatccgctgcttaatcttctcaagacttcacgatcactcacggtgataagggtggttggttgtgatgctccacgcccggtacaaactctccgcaaccagaacccgaaccagcgggtgagggagcgttaacgccgagagcgaccagctctgttccgctgccgctttgcaggcgggagataatccttccgggccgccaatcagcaaactgacgtcgcgcccgtcctgtttccagcgctccagctcattggctaactgcggcgtatcccacggcttgcctggaatatccagggtaacaatgcgattcttaccggcggcggccagcatctgctcgccctctttgtcgagaatgcgtttgatatccgcgttcttgccgcgtttgcccgcagggatttcgatcagctcaaagggcatatctttcggaaaacgacgcagatattccgtaaatcccgtttgaacccagtcgggcatcttcgtgccgacagcgacaagttgcagcttcacgcattaactccagagtttttccagttcatacaggcggcgactttcttcctgcatgacatgcacaatcacatcgcccagatcgacgacaatccagtcagccgcattttcgccttcgacgcccaatggcagcataccggccgcgcgcgacgactgcaccacgtggtcggcaatagacataacgtgacggctggaggtgccggtacaaataatcatacagtcggtgatactggatttaccctgaacatctaaggcgatgatgtcctgacctttcaggtcatcaattttgtcgataacaaaatcctggagtgctttaccctgcaagttttccccctgggtgaataattgcgttataacgatagaaaaaaggccaacaggctggaccggtaaggcgttgcgagttaacgctaaccttccggcgggacgccgtgtagtatacctgaatcagcggcgataccgggacttatgtcgccggatcggcgtttaaaaccagattatcatcccatcccacgtcacagaaagcatcgccatttttgtaaaacaatttctgcaaagctctgcaaggtgaaaaaagcctggctgcggagaataacagcctgtcgggggctgtcaatgggcgaaaccgctgcggcgagaaaaaacggaaaattcatcactcaggccgccagacggcacgactatttaatactttcagggtggcgaacccttcgcatatgtcgattgcgctccagcatccctgttctacccggaaatgccatagcgaggcggcgggcattgtgagcagacgggcaatcaacaggctgagtacgccctgatggctgacgatcagcaggttctggcaatcgctaaacgcgtcgagtcgcgagataaagcgctctacgcgccgggtaaaagcctgaaaaccctcgccattggtcggaaccgcattctgccagtccgtacaccaggcggcatagctttcggcatcttcatgggtgaggtcgcggtgatggcgcatttcccagtcgccaaagtacatctcattaagctcaggtaagatgtgttgcggcacatcccggccctccagtacgagccgggcggtatggcgcgcgcgctccagctcgctgcataacacccggtcaaatggcgcgtggcgcaataaagtatgtagcgttttcgcctggccaatccctttttccgttaacggcgtgggagcatgtccgctatacaacccggcgacattggcctcggtttcgccatgacgcaccagccacaatcgcatggtattcctcatgaggttaaatgcgcaaaacatgataatgcccctgattgcgcaacgtttttttcactaaaatagcgttttttggctggaggcataatggcgttattcaacagcgcgcatggcggtaatattcgggaagccgcgacggtgttgggcatctcgcctgaccagttactggattttagcgcaaacattaatccgctgggtatgcctgtcagcgtgaaacgcgcgcttatcgacaatctggactgcattgagcgctacccggacgccgattattttcatttgcaccaggcgctggcgcgtcatcatcaggtgccggcatcgtggatactggcgggaaatggcgagacggagtcaatctttaccgtggcgagcggtcttaaaccgcgtcgtgcaatgattgtcacgccaggtttcgcggagtatggccgggcgctggcgcaaagtggctgtgaaattcgtcgctggtctctacgcgaagcggatggctggcagcttaccgatgccattcttgaggcgttgacgcccgatctggactgcctgtttctgtgtacgcctaataatcctaccggcctgctgccggagcggccgttattacaggccattgccgatcgctgcaaatcgctgaacattaacctgatcctggatgaagcgtttatcgattttattccgcatgagacgggctttattcctgctcttaaagataatccgcatatctgggtgctgcgttcgctgaccaaattttatgccattcccggcctgcggttgggatatctcgtcaatagcgatgacgcggcgatggcgcggatgcgtcgccaacaaatgccgtggtcggttaacgcgctggcggcgcttgccggtgaggtagcgttacaggatagcgcctggcaacaggcgacctggcattggttacgggaggagggcgcccggttttatcaggcgctttgtcagctccccctgctgacggtttatcccgggcgggcaaactatctgttgttacgctgtgagcgagaggatattgatctgcagcgacggttgctgacgcagcggattttaatccgtagctgcgctaactacccggggctggacagccgctattatcgtgtggcgatacgcagcgctgcgcaaaacgagcgtctgctggcggcgctgcgcaatgtgcttaccggtatagcccctgctgattgatgtagttcagcacgttttccggcaacagatcgtcgcaggattcgcctttttccagccgttcgcggatgagggttgcggagatattaagccagggcgtttccgccaggtaaattttaccggctggcaactggtgcagatcgtccggcgtatgggtcagatgctgttccagccactgctggtgttgcgcctgcgtcatttcaagggggtagccgggacgacgacaaacgatcaggtgagtgttatcaaggatggtgtcgtaatcatgccaggtggggaagttaagcagcgagtcctggccgataataaacgccagcggcgcttcggggccctgttcttcgcgccatgctttcagcgtttgcgcagtgtaagagggcgcgtttcgctgtagctcgcgttcatccagcgtaaaaagcggcttatcggcgatagccagctccagcatatatttacgctgcgcgctggaggcttccggctgggggcgatgcggcggcacattgttaggcataataatcacccgcgataagccgatcagattcgccagcgtttcaacaggtttaagatgtccataatgcaccggatcaaaggtgccgccgaataaagcctgtaacgatttcatatcacccatcaataaatacgtctgccagcgccttatggcagagcaggagcgacagcccttcaagatctgcccataccgactgaccataatcctgtttgagcgtaatttctgtacgcgtcagtaactgcacggcctggcgaagctgcgcaggatggagacgctgcaacgcgtcgccgatcatggggcgacggttttgccagacccggtgtttatcaaacagcgcgcgtaacggcgtatgcgcggactgacgtttgagatttaccagtagcagcagctctcgctggagggtgcgcagcagaataaccggttcgctgccttcaaggcgtagctgttgcagaatgtgcagcgcgcgtttgcttttccccatcagtaacgcatccacccagtggaaaggggtaaagtgggcggcgtcattgacggcctgctccacgcgaggaagcgttaacttaccgtcaggccaaagcagcgacagtcgttccagcgcctgcgccagcgccaacagattgccctcatagcaatagcacagcagttggttcgcggcgtcatccagttgcaaattctgtgctttcgctctggcggccacccagcggggaagctgcgcctgctccggcgtctgacaactgacctgaacgctacggtctgccagcgcggtataccaggctgcgttttcctgcgctttggtgagcttgtttccgcgtactattaataacaggtcgtcatgcagcagctcgctcagggtggcgagttgctcattcattgccgcgttaggcccgttttccggcagttgcagcaccagcgtttgacggctggcgaacagactcatcgcctggcagagtgagaaaagcgatccccagtcggtactgggatcgagagtaaaagcgtggtgctcttcgaagccttgcgacgcagccgccagacgaatagcgtcctgactttcctgcagcagcagcggatcgttgcccaatagcagatatgccgcacgcagcccttcattgagctgcgcgcggagttgttcaggatacaacctgatcattagttactcagcgtagtggagacgcgtgctggcgtagaggcgggcgccgccgtctcattgtcggcggtagcctcctctttcgtcgcctgaatatccgccgcgcggacgctggtcagcttacgaatcagctgttcagcggctttgtcgtacatctcctgaacgatcatggcctgctcgttatccttcgccaacgccatctgcgggttatcgaagaacgaacggtacactttcgtgctgataggatagatgtcatggcccggaatcaataccgaggcattgacggtcatcaccatctgatattccgccgtctggccgtcctggaacactgacgccgtatcctgcaaaatagtcaccgttccaagccgcagagacggaacgtctttgcgcgttgtgtctttatcaagcaggtttacgttattcagccgtaactgattacgtaccgcacgacttagcggaccgttcggatcgccggaatcgaggatcatcgttttcattgaagccggaacctgcgtagtgctacgcagatgccagccgcatccggcggtgaccagcaccgccagagataacaacagtgttaccagatatcgcacgcttcctcccgcgcttagccaacaaccagattgaggagtttacccggaacgtaaatcactttacgcacggtaacgccatcaagatattttgccaccagatgttcctggcctgcacgttcacgcacctgttcttcggtagcatccaccggtacggtgattttcccgcgaactttaccgttaacctgcacgacaaccagcgtggtgttttccaccattgcctgctcgtcggctaccggccacggcgcgttgtcgatatcaccttcgccgcccagctcctgccacaaggtaaagcagacgtgcggcgtgaacgggttaagcatacgcacgacggcctgcagcgcttcctgaagcagtgcgcggtcttgttcgccttcctgcggggctttcgccagtttgttcatcaactccatgatcgccgcaatggcggtgttgaacgtctgacggcggccgatatcatcggtcactttggcaatggttttatgcacatcgcgacgcagcgctttttgatcttcgctcagcgcatcgacgttcagcgccgcgacaggacctttagcggtgtgttcgtaaaccagcttccagacgcgtttaataaagcggtttgcgccttctacgccggactcctgccattccagagtcatatccgccggagaagcgaacatcataaacaggcgtaccgtgtccgcgccataacgttcaaccattacctgcgggtcgataccgttatttttcgacttggacattttactcatgccagtgtagaccagctcatgacccgctgcgtcttttgctttgacaatgcggcctttttcatcgcgctcgacgatagcgtcaactggcgaaacccagttacgttcgccgttctcgccgacataatagaacgcatccgccagtaccatgccctggcacagcaactgtttagccggctcgtcagaggtgaccatgcccgcatcgcgcatcagcttatggaagaagcggaagtagagcaggtgcatgatggcatgttcaataccgccgatgtagatgtcgaccggcagccagtagtttgccgctttcgaatccagcattccttcctgatactgcgggcaggtgtaacgcgcgtagtaccatgacgattccataaaggtgtcgaaggtgtcggtttcacgcagcgccggcataccgttaacggtggttttcgcccactcaggatcggctttaatcgggctggtgatgccgtccatgacgacatcttccggcagaataaccggcagttgatcttccggcgtcggcagcacggtgccgtcttccagggtgaccatcgggatcggcgcgccccagtaacgctgacgggaaacgccccagtcacgcagacgatagttcactttacgttcgccgacgcctttttccgccagtttatcggcaatggcgttaaacgccgcttcaaaggccaggccgtcgaactcgccggagttaaacagcacgcctttttcggtcagcgcctgttcggaaagatccggctcggaaccgtcggcggccagaatcaccggcttgatggtcaaaccgtatttggaggcaaattcgtagtcgcgctgatcgtgacccggaacggccatcaccgcgccagtgccgtactccatcaggacaaagtttgccgcccagaccgggatctcttcgccagttaacggatgaatcgctttatagccggtgtcgacgccttttttctccatggtcgccatttcggcttcggccactttggtgttacggcattcgtcgatgaacgccgccagttcggcgttgttcgccgccgctttttgcgccagcggatgaccggcggccaccgccaggtaagtggcgcccataaaggtatctggacgggtggtatagacggtcagggtgttatcgtaacccttcacatcgaaggtgatttccacgccttcagagcggccaatccagttgcgctgcatcgtttttacggtatcaggccagtggtccagcttatccagatcgcgcaacagctcgtctgcgtaagcggtgattttgataaaccactgtgggatctctttacgctcaactttggtgtcgcagcgccagcagcagccgtcgatcacctgttcgttggcgagaacggtctgatcgttcgggcaccagttaacggcagaagtcttcttgtacaccaggccttttttatacagctcggtgaagaacttctgttcccaacggtagtattccggggtgcaggtcgcgatttcacggctccagtcatagccaaaacccagcgtttttagctggtttttcatatacgcgatgttgtcgtacgtccacggcgccggcgcggtgttgttcttcaccgccgcgccttccgccggcaggccgaaggcgtcccagccgattggctgcagcacgtttttgcccagcatacgctggtagcgggcaaccacgtcgccgatggtgtagttacgtacgtggcccatgtgtagtcggccagaaggatagggaagcatcgacaggcagtaatacttctctttgctctcgtcttcggtcacttcaaatgtgcgcttctcatcccagtgaagctgtactttggattctatctcttccgggcggtattgctcttgcatggcagccagtagtcctgttttcgatacagctacaaatgtagctttagaggtggtgtttagatccgcatagcatagcccaaacacgcacgtcaaaacagggggtagaacatttgtcgcgccaggcgtccgtgaggaggtgacgcaaaatgcgacacgactgaggcaaattaccgcagttcctgtcaccgccagatcggcccataaaaataaagtcatataaaccatgtagttaaaaaatggcacgccttttgattagggaagacaggactaaagcaaaggagttaatcgtgaaaaaaaatgcagtggtgattcaccctcaggattgcgtcgcgacggctattacggcgctcaaggctggcgaaaccgccacaatgttcattggcgaacgcgagataagcgttgtgttacatcaggatgtgccatttggccacaaattcgccatctgcgatgtgccttttcatggcgaagtttataaatatggcgaatccattggccgcgccactcaggaaataaaaagtggcgactatgtgcacgtccacaatgtggaaagtgaacgcggacgtggtgactggaaataatataaaacaagggaaaatgattatgagcaatgagacttttttgggtttccgccgccctgacggccgttttggcatccgtaattatgtactgattttacctaccagcgtttgtgcgaataaagtcgcccaggatattgcccggcaggtaaaaggcgcgacatgggtgaataacgattttggctgctgccaggtggcaggagatgcgcgtctgacggaaaagacattgattaatgtggcgaataatcccaacgtcggcgctattgtggttgtgggcttaggctgtgaaggcgcggagccgctgcgcatcgcagaagagattaccgcatttggcaaaccgacctcctgcattaccattcaggaagagggcggcacgcttaaatgtcaggctcgggggatttcgctggcccgcgattatgcgcaacaactctccatgcaaaaaccgcagcaagcaccggttagcgagctgctgctggcgatggagtgcggcgggtcagatacgacatcggggctggcgtctaacccttcctgcggggtcgcctcggataagctgatacgctgcggcggaagctcaattctttctgaaacgacggaatttattggcgccgagcatgtgatggcgaaacgcgcggtgacgccggaggttggtcaacagcttattgatttagtggtcggctgcgaggcgcgagcaaaagcgctgggcgaggatattcgcgggggacagccgacgccgggcaatattaaaggcgggttgactaccattgaagaaaaatcgttaggctgtatgcataaagcgggtcatgcgccgttacagggcgtactggaatatgccgatagcccaacgcatccgggcctgtggattatggataccccggggcaggatattgaatctatttccggcatggtggcggggggagcgcagatcgttatttttactaccggtcgcggaacgcctgccggtaacccaatagcgccggtaataaaaattacgggtaataaagcaacgtgggaaatgatgcaggacaatattgatattgatgtgtccgccattatgtctggcgaggcttctattacgcaaatgggcgaggaaatttatcaggaaattttacgcgtcgcgaatgggaaaacgactaaatcagaagatttaggtcataacgaattctctatttataagatcgcgccgacgttctgataccaaatcgggcagcacaagctgtccggttatctcctgggaataagctatgaaaattaaaaaaacactggaacgttttcctggtggtatgatggttgtaccgctaatcatcggcgcattgtttaaaacttttgcgccggaggcgctggaaataggcggttttgtcacttctatttcgcatggcgcaatggcgattttaggcatgtttttagtctgtatgggcgcggatatccagtttaaagccgcgccgaaagcgctgaaaaaaggcgctgcgatcacctttgcgaaatttgccagcggcgtgattattggcattctggtcggaaaattttgcggcccggatgggttattaggtctgtcggctttagcgattatttcggcgatgaccaactcgaacagtgggttatatgccgcgttggtgggggagtacggcgatgaaaccgacggcggcgcgattgcggtaatatcgttgaacgatggtccctttttcaccatgctggcgttaggatcggcaggcatggtgtcgataccctttatgaatctggtggcggttattattcccattatcattggcatgattttgggtaatctggatgaggacatgcgcaagtttcttaaacagggcagcgtggtaacgattcccttttttgcctttgggttaggatacggtattgatttcgcaagacttatcacggcaggttcttcaggcattttactgggactcatgacggtggcgattggcggattttttaatattttcgccgatcgtctgacgggaggcagcggcgtggcaggcgcggcggtctccaccacctctggcaacgccgtcgcgacgccagcggcaatcgcgctgctcgatccgcattttaccgacctggcgtcgacggcggcggcgcaggtggcggcctcgacgattattaccgctctgtgcgcccccttcctgaccgtatggataaaaaaacgctacgatcgtaaactgaacccagccgccgcaggcggttagcgtttcggcggaaaataaatcacgacgggcggtctcgcccgttcataaaccaacaggatggtgagtgatgaataagacgaaagatatagccgcatctcctctctgttttgtctctccttaccctcaactggcaaaggctgccgaggcgctggtcgcgcagttggattacgccgtcactattcatcaaacgacgcttaatcgtatcctggatgagctacctttattagagtcccgtgggcaccaggtactgattagtcgtggcggatgtgcggaaatattaaaaaagcacagtaaattaccggtagtcgaaattaaaatgtccggctacgacattcttgatgcgcttatcccttttaaaggacaaaaaggcactgtcggtattgtcggcttttccagtgtgatcaaaggatgcgcgcgcgtagcggaacagttaaatattaactataaaatttttaccttacagggaaatgataaagaaacgatttcttgcctgaagcggcaattagcgtccacgccattagattgcattgttggcgataccgtttgtcaggattatttttcaccgctgggctcgcaattccgtttacttgattccagccccgcctcaataaccgaagctctggaagaagcccgctcattatatctggcttttcgcagccaattactcgagcgtcatcatctgcagctgattctcgatcagtttgataaagctgttatcacgcttgatgataccggcgcgttactgcattacaataaatatgcgagccaactttttaaaattaacgcctccggtgagatttatgacgcatctttcctgaaacaggtattgcaccaggagcggcatacattacgtgagggaaaaaccgtcagcgcgaaagtcgtcgatacgccgcaaggcgcgatggtagttaatctgtatccggtatttgcggccagacagttaagccgggtagtgttgacgatgcaaaccgtctccagtttacagggggcggaacatcatgttcgccgccaggaactgtctcgccgcggcttgagcgcccgctatcatttcgacgatctgcttaccgaaaacccggaaatgctgcgtcgtctggcgatcattaaaaattatgccggtacggacgcgactatcttaattaatggcgaaagcgggacgggaaaagaggtgctggcgcaaagtattcataatgccagccaacgcgtcaacggcccgtttgtcgccattaactgcggcgcgatggcccctcagattctggagagcgaactctttggctatgtcgccggcgcatttaccggcgcgtcgccgaaaggcaaaataggcctgtttgaattagcgcaccacggtaccatttttctggatgagattagcgagctggataaaccgctacagacgcgcttattacgggtattgcaggagcggcagattatgcggctgggctcagaccagatgatacctgttgatattcgcgtgattgcggcgaccaatcagacgttaacgaagctcattgcggacgggacatttcgcgaagatctttactatcggcttaacgtattaaaagtgaccaccatcccgctacgcaaacgtccggaggatatcaaagccatcggcctgtcgctgcttactagtttcagccagcattataaacgcccggcactaacgttaaccccggcgctgtggcaagagcttcagcgcttcgcctggcccggaaacgtcaggcagttaagcaatattatcgaacggctggtactctctattgatcactccccggcaacgctggatgagggtcgcctcttgctggacgatctggaagaggggagccgacgcgagccaactacctgccacgactgccagatgctggctggcgattataaaacgattcgcctgcgtattttgagaaaattattagaggcggaaagggataataaatcgttagtggcgaaacggttaaatgtcgatcgtacctcgctgacgcgctggatacgcgagtcggcctgacaagaatttacagactctgtgggcagccttgcaaagcgtaacgcaaataacgtctattattataggcagttaacgatccaagaggtgaagtgatgaacaaggttgctcaatattaccgtgaactggtggcctcattaagcgagcgtttacgcaatggcgagcgcgacattgatgcgctggtggagcaggcgcgccagcgcgtgatgcaaacaggggagttaacgcggaccgaggtggacgaactgacgcgcgctgtcagacgcgatctggaagagttcgccatgagctacgaagagagccaggacgatagcgtcttcttacgggtgattaaagagagtctctggcaggaattggcggacattaccgacaaaacccagctggaatggcgtgaagtcttccaggatttgaatcaccacggcgtgtatcacagtggcgaagtggtgggattggggaatctggtgtgcgagaaatgccactatcatctggcggtttacacgccggatgtgttgccgctctgcccgaagtgtggccacgatcagttccagcgcaggccgtttgagccgtaaggttcattatcgtgagcggacggttgccgtccgccatgttaagcgtgcagttgggcttccagtttgcggatctcttcatcgacgttccatttgcccgtgggctgtgcttttttgaaccagtagagcgcttgttgtaggtcttgtgcggtaccgtgtccatctctgtacatgcatccgaggttgtaccagcccgatgaattgttacattctgctgatttgtggaaccattccagtgctagcgaataattttgctcgacgccatgaccgcatttgtacatccagccgatactgttataggcatcatcgtcaccctggtctgccgcttttcgaaaccagtatattgcctgctggtaatcttgtttgataccttttccgatgtaataacaatagcccatctgatattgcgagtagctgctctcttgtagcgcgctcttcttgtaccaaagggcggcaagggataaatttttccgacatcctttcccattgccatacatatacgccagtctttcctggctggcgcaatggccttgtaatgctgcctgtttaaaccagtagagtgcctgtgtatcattttgctctacgccagttcctgaatgatacattctcccgagattatattgcgcaaggttgtggctctgttctgctcctttgcgataccaggcaacggcctgggcataatctggcgccatcccggtttctccttcctgaacccagcctaatgtgttgaaagcgtggcggtgtccttgctgtgcggctttttctgaccagaataaagccagcgtattatctttcatgtcggtaggcgtgtctttgtatcgtaagccgagccaatattgtgcctcgcagtgtccttgttcagctgcctgctgcaaccaataaaaagagagcttatcctcttcgctgccatctatacgttcgtcattatataaacggcctaatatatattgagcttcactatttcctgactgcgccagttcggttaattgtgctaaagatacgttgtcgcagggatgactggttatggaatgattcattttttaatttatcccgccattgttttttagattaataatatattgcgatttggctttgttgtactctattttagttttcaattgcgtttttatttgtggtgtgaatatattttggcgatttattatggataaagaatcacaatatttactctttgcactttcctcgccgatggaagtattgaacgaggactgtttaccttcacattcgtcaccgaaaatgtatttaggtgtaaaacgtttcgatcttgaatcgtcgtggggtattgaaaatcgcgatgaactgcttcagaccatttcccgcaggacggatgacggtcatgccacacaactggaatggctatatcgccgctggtttaggtatgcgccgcaggagtggcaggagtataccgacgcgctggacgagggagatcgcatttatgcccgattcgtcgctgataccgccgtgtgttgcggcgaaggtggtattcgcagttgggattatgtgcggatgggatttctctgccgcatgggcgtgctcaatgaatggctgacggaagaggagagcctgtggctgcagtcgcggatacagcttcgcgcgctcagctattattccggctggttgccgtacttcagcgcttattacaccgggcgtttgtactggcagttacggaatggcgataacctaccgctgctacgcgagacattcgcccgtaaggagtttgatgacgcggggcgacgtatgatgaataaactgatcgccgggaaggacagtttttacgccacgctgccgtggcgctacctgccccattaccctgaatgcccggacacgcttcaggaggtgagcgatctatgaaaacctgttggcaagtccttggcattgaggccaccacggataccgacgccattcgtcaggcttatctggcgctgctgccgtcatttcatccggaaaccgatccgcagggttttaagcaattgcgagaagcctatgagaatgcattgcaggggacaacatcgcccgccattacggtggttgatgaggatcccgataccccgtgggtgaattatctcagggagatattcggtgatttgctggcggatggcgaacggcgctttcagccgcaggcatggcaggagtttatccaacagatcaataaattatcgatttcacaggtcgaaaaatcgcgctggtggctgtgcgctatcgcgatgaagacctttcctatttcgtactcgtgtctgaaactgctgtcagatcgcctggcctgggaacaggggagtgataatcgagatgtcgatgccgaggaggtggaggatcttttgtttgaaatccgccgtggcgacctgtttgattattcgctattgctgcatttgccagtggcggtacaaaaccagaccattgctttttatgatgccctggacaacacctttttcgagcatcctctctatttcgcccaacttatggcccagcacggcccgtggattatcccggacaatctacgctttcaacgacgtctgttacgctggttcagcaccttgcactggggtattgcggagctgctgcctgtcgccctggcatggcaggaagccgaacccgataacgcaacgccgggttattactacttagcccagcgcgtattttgcggtgaaggcgatagcctgctgccagaactttacgcgcagtggtgggcgcatccttctacccagcttgacgatctgttgctgcgctggtgccgtcagcatcgaccggactttttcccgctgctggtgatggcggttgaggggcgtgagcaggtggatattaacgctgaacagctgctgtatattcccggctcaagcgctcgttcctgcttgctgtgggccgaggcgctgcacagcggcgcattatcgccgctaagcgaaagttttattgcgcggcgtttgaattatggcgcgccagcggtgagtgaggcgcatagccagcatccatactggctgttgtatcaggtggcggatagcctggcgtgcgccgaggagccgtcagcggcattgttacagagtctggtaacgaagcttgatgcgccggatatctgcccgttggaagcgctggttattcgcgggttgctggggcgggctgcggctgtcgccacaccgtgtgaagctgtagtcgcagatgaagaaccggtgacgacggtgacttcgccgagtacggaggaatctggcggcggctttggcctctggcaggtgattaaaatcattttatttattggcgttgtcggccatgtattacgccagtttatgcattagggatatcgaatatggacaaggaagaacaatatttactttttgcgctctccacgccgatggaggtgctatatatcggcaatgagccttcgcatacctctccagcaatgtataccggaattcctgctgtcgatctctccgattcatggggggattgataaccgtgaagatcttattcaaaccatctatcggatgacggacgatggtcatgcggcagatttggctcccttttatatccgctggtttacgctatctcctcgtcaatggcgcgaatttaccgcgcagtttggcgagcagggccagatttatgcgcgatttgttgccgaaaccgcactatgctgcgggcgcggaggcattaaagcctgggactatgtgcgtatggggtttttatgccggatgggggtgttgaatcaatggctgacggaagaggaaagcctgtggctgcaatcgcgtatctatgcgcgggcgtactatttttacgacggttggacgcaatattttgccgcctattcgttgggtcggctgtactggcaggctaaaggggacaccatacaggcatatttcgctcacctaaagtacgacgcttcaggcgcgcggatgtttaatgaactggcctctacgacagagagttattatgcgcagctaccgtggcgtccgctcaacgaacaaccgacatgcccggaaacgcttaaaggagtgagcgatttatgaatatctgttgggaaatcctgggcattgaacctaccaccgatctggaatgtatccgtcaggcttatcttgccctgttgccctcattccaccctgagagcgatccgcagggttttaagcgattgcgccaggcctatgaagaagcgcagcactgggccgcctcgcctgcggaggacgcaaaaatggaagaggtgggcgacgaacatgaaatactggtggcgttcagggaattgctggcatcagagcgcgatcgctttcagccctcggcatggcagaaatttattcagcaattgaaccagtgttcaatggatgagatagataagctgcgctggcagttgtgcgacatcgccatgaaaacggaaacgatctcgctgtcttgcctggcattgttggcgcagcgtctgaactggcagccgcaggaagcagaagatgatgctgatggagaagagctggaagcatttctggagaccgtaaagcggggcgatgcgtttgatctgctaagtctggccaaattgcctcttgttgttcaagaccaaactgacgcctacttttttaagcttgagcatatctggcgcttttatcccgaacattttgccgacgctctacaggttcagggcgcctggataattcccgatgataaacagctgcatcgtaaactattacactggtttagcgccgagcagtggggcatggcggaactggtcgatattgctcgtcgctggcaggccgcggagccggataacgaagatgcgcactattacctgtgcaaacagcgtttgctctgcggtgaaggggaaagcctgttggccgacctttgcgatttctggcagcgttatccctccacgcaggcggacgacctgttgctgggctggtgccgccagcatcggcctgatttcttcccgctggcggtgatggcggtcgaagcgcgctgtatggcggatgccgaatatgtccccggtgaaagcgcgcgcacgcgtttactgtgggccgacattttgcacagcggtaggttatcaccgctggggcgttcatttgttgactccctgttttataagcgaaaagcgatggcgtgggcaaattcacggctgagtacccagggggaacccgaaacgccgctgttggatctgtaccggacggcggagcaggtggtgctggaagcgtttcccaaagaaaagcccttttttcgcctgctgatccggctggaggaggggcaatcctgtccgctggaggcgctgataacgcaggcattgtcatctaaaatcgccatgaagccaggcgatattcgtgacaaaaaggagctggcggaagagctcaggctggcggctgagaaagaagagacaaaattgtcttctgaagcgaaaaccgaagcaccccgtcaggcggaatctggcggggtgatgaaaatcatgaagattgtcggtttgatcgcgttgattgtctgcgcgttaaatcgattcttccattttttctgaacaggggtagtgaaagcgccgttacggcgctttcggctcgtcaatacccagatattcacaggcgcgacggcgtacgtcatcgacacgctgcatatcattagacagcagggccgcgtcgaaatcggtaataatctcccccagcatttcgcgctcatcgcctaacgcgcgtgaccactgctcctctaactgtgctttaaacgtccggttaatcagcatatcgcggggataaattttcagcgccagcagccgctcgcggctggcgtcgatttgctgcgtcgtcagtgaggtggcattgtgactgatgattctggattcactcttgccgtcttccagcagcacgtcaacttccagcagaccattaatatcgtagctaaaacgaatatcaatggcctgaatgtgcccgttcggcttcagcatgacgtcaaaagaatcaatcaggatattatttttcaccttatggctttcgccctggtataccctgacgcaaatagagtcctgctcagggtgcatggtggagtacgtttccacttttgacaccggaacggtggtattgcgttcaatgatgggcgagaaaataccaggcactccctgtcggttgacttccacgcccagcgagtaggggcagatatccgtgaggatcacctcttcaacgtcttcatggcgcaggcgacaggcggcctgagttgcggcgccaagcgccacgatggtgctgggatcgtaactttgatagggcaatttaccgaataagcgcaccgcgatgcgttgcaccagcggcatctgtgacgcgccgccgaccagcaccaggctgtcaatttgctccggtttgagtcgggagtcgcgcagcgcctgctcaatgggcgtgcgcagccggttgagcaacggtagccacagggcttccagctcatcgtcataaaacgtgctttccagaacgctctcctgataaagccagctcatgcgcagcggggagctgctggcgcattttgcggcttcaacacaggcatacagcgcagccagatcgctatccgtcagcgctgatttatcgaggttccagcgtttcagcacttcatcaagcaacaaatgcgtgaaatcttcgccgccgaggtagttatcgccagcggaggcgtgaacttcgataatcggcgtagcgtattccagaacggtcacatcaaaggttccgccccccagatcgaaaaccagcgaacggctattttgctgcgtatgcaggccataagccattgccgccgccgtgggttcattgatcaagcgcacggcgtttaaccccgcaagctcagcggcaaggcgtgtatgcttacgctgctcatcgctgaaataagccggaaccgagatcacgacatccttgattggctgctgaaggtagtcttccgcatcttctttcagcgagcgtaaaaccagcgaagataattccggcgcattaaacgactcttcacccaaatgccagtgagtattactgcccattgcgcgtttaaataaggcagcggttttatctggatgagatgttttacgggctgcggcaggttttcccaccagaatttgtttattttcatccatactaattatggatggtgttaaatattcaccaaatttattaggtattaattgtgcggctccgtcttgccagacggcgattaaactattagtggtgccgagatcgataccaatcgctaacgttgcattatccattgcgtttaatttatcgggaaagagagtttatagaataaagaacaccaccctctggcgtggtgatctttatcaatgtcacgcctggcgaaagtattcatccataatgttcgtcaactccgggcgctcgccgtcatcattgatggcgaaatcgaggaaaaaagcatcggcctgtggcgtgcgtttctgggccagtaaacgaaacgccagcgggtagtggcaagcataaccgggtgcgcgagtcagaaaacggacaaaatcaatcaacaagggagaatgggtataaaacagcgcgcgtaacagtacggcgggaaatccctcttcggtgatcccttgcgccatgattttgttgaggccggcttcgctcaaatcgcctgcggcaataatatctgcgcaggccgcaagatcgggataatgcgttgcgcagttagccaatgcgttcggccagttgacgcgggtataacgttcgtcatggcgagtaaagtaatcctcccaaagggatggcggtagtttttcgtactgtattttcagggggatgcggcgctgaaactgggcttcttccaggcgctcgccgtcataaaatcgcaggcattgctgtcgcgtctcgtagcatgtcatcgccaccggctggctgatgacccaggtcttcacgggccggccttccagcgcggcggcggtggctttatggtgaccatcaagcaggacgcaaagccagctgtcattcatataccaggccagcgcgtggctctctggcttatcgcgataatacccggcgcgttgtgggttaaatcgcgatgggggctggcctggcagtaaaaaacagggttcgccggactggtagtgatagtccacgtcagcaatccactgccctgtggtcgcgggattcggttgtttttcgttacccaccgcccagaaaaaatgtccgttgccatctgtgggataaagttcgcgttcctccagtcggtaatagccatcggcaaagagtgaaaacagcggcgtcagggcggtaaatgcttcgttcaacccgactcctggctgattccactcggcaagtgaggataaaaactccgcggcgccttcatcatcattgctaaaaccggcataaacaaattctgcgcaggtcgggcaccaggcttcagtgtaaaaacgaatcagcggcgagccatgccaggaaagcgtatgaataccggcgtcagagtcgggatcgtggataacgctgggacgaagcaatgcttttccgttacgtactgaaaacgtaatatgggctacatcgtgctgtagcaggctgatttcaggtctattgttacgccaaaacatcgctgttcatccctggattctactttgcgctttatgcgtagtattgcagccgttccgccagcaaatcgacaaatccctggcggtctacatcgaccatcaccgtcgcattcggcttattccccgtcaggaaataataatccaccaccgtcatcccctgggtgtatttcccctgggtttccacgccgacccaacgctcaacggtggtgaaaatctcgggcttgagcagccaggcgatggtgcacgggtcgtgcagcggtgcgccgacaaatccccatttttcgtctttgtggtactccataaagaagtccagcagttcggcgacgatggtggaaatcgggttaccgatggcgcgaaagcgttcgatatcggcggcgtgaatctgtgccttatgagtgacgtccagcccggccatcaccaccggaatgcctgactggaagacaatttctgccgcttccgggtcgacgtaaatattaaattccgcagcgggcgtccagttacccagcgccatcgcgccgcccatgatcacaatgcgggcgattttcgtatgcagttccggatggctattcagcagcagcgccacgttggtctgtgggccagtggagacgatggtgaccggttgtgcgctctcgcgcagcgtttttgccatcagctcaacggcagtgccgctttgcggggcgaatgacggctcgggcagcgccgggccgtcgaggccgctttcgccgtgaacgttatcggcgataatcagttcgcgcatgagaggtttcaccgcgccgcccgccaccggaatatccaggcgtttgagcagtgtcagcatccgcagcacgttgcgcagggtcttctccggcgtctggttaccggcggaagaggtgatcgctttcacttccagttcaggggaggcgagggcgagaacgagggcgatcgcgtcatcatgacccggatcgcaatcaataataatgggcagtgccattgtggctccttgtaagcggtactttgtgacaaggttaacgcccggctggatacgtttcgagaagcgaagaagtaaagcgtgagatagcgcgcactctgacgtgcgcgccgggaagattagtgcaggattttcgcaaggaagtcttttgcgcgatcggaactggggttagcgaagaactcctcttttggcgaatcttcgacgattttaccttcatccataaagatcacccggttagccactttacgggcaaagcccatttcgtgcgtcaccaccatcatggtcatcccttcgttcgccagctcgaccattacgtccagtacctcgttgatcatttccggatcgagcgctgaagttggttcatcgaataacatggcaatggggtccatacatagcgcgcgggcgatcgccacgcgttgttgctgaccgccggaaagctgcgccgggaacttgttggcatgtgcagacaggccaacgcgctccagcagcttcaggcctttatcgcgggcggcggccttatcgcgtttcagcactttcacctgcgccagcgtcaggttttcgatgatcgacaggtggggaaacagctcgaagtgctggaataccatgcccacgcgggaacgcagtttcgccagatcggtttttttgtcgttcacaataatgccgttaacggtaatttcgcctttttgcactggttccagaccgttgacggtcttaattagcgtggatttaccggaacccgatggcccgcagactactaccacctcaccttttttcacttctgttgaacaatcggtcagcacctgaaagtgaccataccattttgaaacatttttcagggtaatcattaaacagtccttttcttcaaatagctgaccagcaacgacgcgctcaggctgataacaaaataaacggcgccggcgaacagaatcatttcgacctgagtaccgtcacgctcgccgatagtcgacgcggtgcggaagaagtccgccaggctgagtacataaactaaagaggtgtcctgaaatagcacgatgccctgcgtaagcaacagcggcaccatcgcccgaaacgcctgcggcagaataatgagcttcatcgactgccagtgggtcatccccagcgccagcgcggcgctggactgcccgcgggaaatactttgaataccggcgcgaataatctcggaatagtaggccgcttcaaacatggagaatgccaccatcgcggagatcaggcggatatcggttttcggcgatagtcccagcacgttttgcagaaagccgggtacaatcagatagaaccacagcaagaccatcaccaacgggatggaacggaaaacgttaacatacgctttagcaaaccaggcgataggggcaaagcttgagaggcgcatgacggccagaatggttccccagactatccccacgataacggcggtgacggtgatcttcagcgtgatgaccaacccggccagtaggtaaggcagtgaggggataatcgaactccagtcaaattcgtacattatttgctccccacgttgcccggcaggcggactttgcgttcaaccaggctcatgaccagcatgataacggcgttaatcagcacataggccagcgtaatggcggtgaaggattcccaggcgtgcgccgagtaatccaacagtttgcctgcctgcgccgccatatccaccaggccgatggttgaggcaatagccgagtttttcaccaggttcatcatctctgacgtcattggcggtacgataacgcgataggcattcggcagcaggacatagcgataagcctgcggcagcgttagccccatcgccagcgccgcgttcttctgcccgcgaggcagagactgaatcgcggcgcgcacctgttcgcaaacgcgggcggcggtaaacagtcccagacagatcattgaggagaggaaaaactgaatattgggatcgagttccgccttaaaccacatgccaagatcttccggcaacagttcaggcaccaccaggtaccaggtgaagaattgcacgatcagcggcacattacggaacagttctacgtacaacgtgcccagtccggagaggaaacggttgggaacggtacgtaaaatgccgaaaatagatcctaccaggaaagcgataatccaggcggtaatcgaaagggcgacggtgacctgaaaaccactccatagccagccgagataggtggtattgccgaagggggcttcctgtaaaaaaataccccagttccagtctattgacatacatctactccgaaaaaaaagggtagcagcgctaccctcgaagattgttgcccggcgatttgcggcttcaggcccgatggggaacgaccatcaggcttatagtctgtccgtgctgagcgacaatcgagaggacaggagtcccgtcccatttagttttagttagttaagcgctttatcattcggtgctttgaacagggctttcatctcgtcagacaactcgaaattcatgttcaggtttttcggtgggatcggatttttaaaccacttatcaaaccacttttccgcttcgccggaggtttgcgcctgggcgatggtatcgtccatcagctttttaaactcaggggcgtttttacgcagcatacagccgtaggcttcctgggactgcggtttaccgacaatctcccagttatccggtttcttggctttggcgcgctcgccggccagcagcgcgtcatccatcataaaggcgacggcgcgaccgctttccagggtgcggaacgagtcaccgtggtctttcgcgctaataatacgcatccccatcttttgctcttcgttaagcttatgcagcagaatttcagaggtcgtcccggaggtgacgacgaccgctttgcctttcagatccgggaaatctttaatatcgccgccttttttagtcagcagtcgcgtcccgacgacgaaaatcgtatcggagaaggcggcctgtttctggcgctcaaggttgttagtcgttgaaccacattcaaaatcgaaggttccgttttgcaatagtggaatacggttttgcgaggtgatcgggatcagcttcacctgcagatcgggcttgttaagtttcttttttaccgcttccacaatggcgttggagtagtcctgggaatagccgaccactttctgctggttgtcgtaataagaaaagggcacagaagattcgcgatgcccgacgacgatcacgccatttttagcgatcttgtccagggtgctaccagcggcaggcgcgccatcttctgcgtgcgcaaggcccgcagacagtcccatgaccagcattgctgtggttagcttacgtaattgcatatccaactcctttatcatctgcgccgtcgacgcattgatagctattgtgatgttgttattgcctgcaacttgcgcgtgcagtgttatgtgtgtttgttaacatttagtgtggcttgttgtaaatattttgctgcgatattgtttatttttgcgaagtgcgccgcaccgttcagaggcaaaaatcctacattgcaccgttcaggtgctaccgatgatcgattttggtgcgaccaggttgcacaagcagccagaacaggtttgccatgtttaacaaagcaatagacgtgccagaatgggggaaaaaggaggattttcaggccggataaatgaagcgctatccggcctggggagagattatttccgtcgttgtcgcagactcatcactaccgcgccaaaagcaaacagcgcggtcagtacccatagcggccagttgccggtacgggcatagggagttaaccccgtggttggcgtgacattggtggtcagtacctggcgtgtgaactgcgggatcatcgcctgaatctcgccctgagggccaatcaccgccgtaataccgttattagtactgcgcagcaacggacgcgccagctccagcgaacgcatccgcgccatctggaaatgttgccacgggccaatggacttaccaaaccaggcgtcgttagaaatcgtcagcagatagtcggtgtccgggcggaagttatcccgcacctgttcgccaagaataatttcatagcagattgccgccgtcagcttatagtcgtgcgcatgtaactgcggctggatataagggccgcggctaaaggaggacatgggcagatcgaagaacggcgccagcggacgcaggatagactccagcggaacgaactcgccaaagggcacaaggtgatttttattgtagcgattgggcgagtcataactgtatggattatccttgcccaacgtaataatcgtattgtaggtgtcgtatcgattctgtttattgagacgcgcatcgacaataccggtgatcagcgtgctatttttttcgcgtaacatctcgtccagcgaacgaaggaagggctgctgattgatttcgagatccggaatcgccgactcaggccagataataatctgtgatttgcctaactctgggcgagtttcgttgagataaatttttagcgtattcagtagctggttttcgtcccacttcagcgactgcgggatatcgccctgcaccagcgatacctgggtcgctttggccggttccagcgtaaaccactggatataacgtagcggaaagggcaaagcaaacagaatcacggcgacagccagcggacgccagttccgcgtcgccagtgccagcgctaacaggccgctgaccatcatcagcaggaagttgatcgcttcgacgcccattaccggcgccaggccttttagcgggccatcgacctgactatagccaaattgcagccaggggaagccggtcagcacccagccgcgtaaaaattcggtgatttgccatattgcaggcgcggcgatagcgacgcgcagccagttggtttttggccacaggcgcgacaaaatcccggcaaacagtccggtatacagcgagagataagctgcaagcagcaccaccagaaaaacgttaaccgggcccggcatgccgccaaactgcgcgatactgacataaacccagttaatcccgctaccgaaaagtccgagtccccagcaatagccgatggcggcagactggagcgggcggcgattaaacgttaaggcctgcagcccgataagcgacactatcgctgcgggccagacgtcatacggagagaaagccagtgttccgcaggcgccgaataataacgccagcagcaggcgaatacgctggcgttcaattaacgaggcaaatgccatttttagtccactattgctgttattcgtccagttttggctggggcgagtcatccgggatcctgacatgcacctgaataatacgacgactatcggccatcgccactttgaactggtaaccatcaatgtcaatggtttcgccgcgggccggtaaatggccgaacgcctgcatcaccagcccgccgatggtatcgacctcttcatcgctgaagtgggtgccgaaagcgtcattgaagtcttcaatcgacgccagcgcgcgaatcgtccaggtatggcggctaagctgacggaagtcgatatcgtcttcttcgtcatactcatcttcaatttcaccgacaatcagttcgaggatgtcttcgatagtcacaaggccggaaacgccgccaaactcatcgataacgatggccatatggtagcgctgggagcggaattccttgagcatacggtcaacccgtttgctttccggtacgacaaccgcggtgcgtaacactttgtccatgctgaaggcttcggcatcgctgcgcataaacggcagcaaatctttggccatcagaatcccttcaatgtgatctttatcttcgctgatcaccggaaaacgcgagtgggcggactcgatgataacatcaagacattcgtccagcgtctggttgcgttttagggtaatcatctgggagcgcgggatcataatatcgcgaacgcgctggtcggcgatgtccattacgccttcgagcatatcgcgcgtatcttcatcgataagctcgttctgcccggaatcacggatcagcgccagcaactcatcacggtttttaggttcaccgtggaaaagctggctgagtagcagggaaaaaaatccctttttactgtttactgtgtcactactgtgtgaattgtcgtcgctcatggcgtcgtatgggttctcatgttagttaatacaaagctcgtcatgcgtatactcagctgtgacggcatgttttgcctgatggcgctacgcttatcaggcctacaaaaggcatgaatgtaggccggataaggcgcaagcgccgccatccggcaagctactattctgcaatcttctcggcaatgtacggatcctcatagcccatagcaagcataatctccgtttcgagagactccatctcttccgcttcgtcatcgtcgatatgatcgtaacccagcaaatgcaggctaccgtgcacgaccatgtgcgcccagtgcgcctccagcggcttgctctgttcttgcgcttcctgctccacgacctgacggcaaataatcagatcgcccagtagcggcatttcaatgccggcgggcgcttcaaacgggaaggagagaacattagtgggtttatctttcccgcggtacgtcaaattaaggtcgtggctttcggcctcatccaccagacggattgtgacttccgcctcttcctgaaactgcggaataacgccgtccagccagcgttgaaactgagcttcatccggcaggcccgcgtggttttcacaggccaactgtaaatcgaggatcacctggctcatttctgttcctgctcctgggcttcacgcttacgctctgccgccaacgccgctttgcgtttttgttcggcctcttcccaggcttcataggcgttaacaatgcgggcaacgaccggatggcgcaccacgtcttcgctgtggaagaagttgaaactgatttcatcgacttccgccagcacttcaatggcatgacgcaagccggatttggtgttgcgtggcaggtcaatctgcgtcacgtcgccggtgatcaccgctttcgagttaaagccgatacgcgtcaggaacatcttcatctgttcgatagtggtgttctggctttcatccagaatgataaaggcgtcgtttaatgtgcgtccgcgcatataggccagcggcgcgacttcaatcacattgcgttcaatcagcttctcgactttttcaaagccgagcatttcgaacagcgcgtcatacagcggacgcaggtacgggtccaccttctgacttaaatcgcctggcagaaagccgagtttttcgcccgcttccaccgccggacgggtcagtagaatacggcgaatctcctggcgctccagggcgtctaccgcagcggcgaccgcaagatacgttttaccggtacccgccgggccgacgccaaaggtaatatcatgatcgagaatattggcgatgtactgcgcctggttcggggtacgcggtttaatcacgccgcgcttggttttgatattaatagctttgccatagtcaggcacgctttccgcgctctgttccagcacccgcgcttctttgatcgccagatgaatttgttccggttcgatatcctgagtctggccgcgcatcggtgcggtatcgacatacagacttcgcaaaatatctgtcgccgcggtcacgcaaatcggacgaccggtcagtttaaagtgattgtcacggcggttgatttcaataccgagacgacgttcgagctgtttaatattgtcatcaaacggcccgcaaaggctcaacagacgggcgttgtctgcgggctcaagggtaatttcgcgagtgtctatattcaaactgttcctcttgtgtctgtatcgccggacgctgaacacttaccggcatctaaggaaattattcacgccatagggaaaaggcgcaagcattgcaatgaagatggggatgaagagagaaaattgcaaggcccgtcgggcgacaggccatgaccaggaagcccgacaggcgtagcgccatcgggcattattgccttttcagtagggttaaggctggtagaatcctacgcccagctcattttctttacgggtacgggcaatgacggactccggcgtttcggcgacgcgcagccccatttcatcttcggtacgcaccacttttccgcgcagggagttcggatagacgtcagtaatttccacatcgacaaacttaccaatcatctccggcgtgccttcaaagttcaccacccgattgttttcggtacggccagacagttccataatgtttttacgcgacgtgccttccaccagaatgcgctgtgtcgtgccgagcatacggcggctccatgccatcgcctgctgattgatacgctcttgcagaatatacagacgctgcttcttctcttcttccggcacgtcatcaaccatatcggcagccggcgttcccggacgcgcagagaagataaagctgtagctcatatcaaagttgacgtcagcgataagcttcatggttttttcgaaatcatcggtagtttcgccagggaatccgacgataaagtcagagcttatctgaatgtccggccgcgccgcgcgcagtttacggatgattgctttatattccagcgcagtgtgggtgcgccccatcagattcaacacgcgatcggaaccgctctgtaccggcagatgcaggaaactgaccagttccggcgtatcgcggtatacctcgataatatcgtcggtgaactcaatcggatggctggtggtaaagcgaatacggtcaatgccgtcgatggcggcaaccagacgcagcagatcggcaaaggtaccggtggtgccgtcgtagttttctccgcgccaggcgttaacgttctggcccagcaggttgacctcacgcacgccctgcgccgctaactgggcgatttcgaacaggatatcgtctgagggacggctgacttcttcaccgcgggtatacggtaccacacagtaagtacaatatttattgcagccttccatgatagaaacgaaagcggtcgggccttctgcgcgcggttccggcaaacggtcgaacttctcgatttccgggaagctgatatcgaccaccgggctgcggtcgccacgcacggagttaatcatctccggtaggcggtgtaaggtttgcgggccaaaaataatgtcgacgtaatgggcgcgttgacgaatgtgctcgccttcctgggaagccacgcagccgccgacgccgataatcagatcgggatttttctcttttaacagtctccagcgacctaattgatggaagactttttcctgagccttctcgcggattgagcaggtattcaacagcagcacatccgcctcttccgccacgtcggtcagttgatagccgtgggtggcgtccagcagatcggccatcttcgatgaatcgtactcgttcatctgacagccccaggttttaatatggagttttttagtcatcgacttgctcttgcgaaatagtggctgaaaagcagggcgcatagtgtaatgctttggcgcggttgtgaccagtatgactgacgtcagccctaatgggtaaaaaatcctgtaaacttgtctaaaacgtaacaggatgaatgaccatgacaaatcaaccaacggaaattgccattgtcggcgggggaatggtcggcggcgcgctggcgctgggtctggcgcagcaagggtttacggtgatggtaatagaacatgccgcgcctgcgccgtttgtggcggacagccagcctgacgtgcggatttcggccattagcgcggcatccgtggcgctgctcaagggactgggcgtttgggaggcggtgcaggggatgcgtagccatccttatcggcgactggagacctgggagtgggaaaacgcccatgtggtgttcgacgccgctgaactcaagctgccgctgttaggctatatggtagagaacaacgtcctgcaacaggcgctatggcaggcgctggaagcgcaccccggcgtgacgctgcgcgttccggcttcactggcggcattgcaacgccgccacgatggttatgcgctggaactggccgacggcgaatgtatcacgccgaagttagtgattggcgccgacggcgcgaattcgcaggttcggcaaatggcgggaattggcattcatgcctggcaatatgcgcagtcgtgtatgcttatcaccgtcaagtgtgaaaatgcgccaggcgacagcacctggcagcagtttacgccaacggggccgcgcgcctttttgccgctgttcgatgattgggcgtcgctggtgtggtatgacgctccggcacgtattcgccagttgcagggtttatcgatgacgcaattgcaggtggaaattaaccagcactttccggcgcgtctgggggcggtgatgcctgtcgcggcgggcgcgtttccgctaacccgtcgtcacgcgttgcagtatgcgcaaccggggctggcgctggtaggcgacgcggcgcataccattcatccgctggccgggcagggcgtcaacctggggtatcgggatgttgatgcgttgattgatgtgctggcgagtgcccgtagctatggcgagtcctgggccagccattcggtgttgaaacgctatcagacgcggcgcatggcagataattttatgatgcaaagtggaatggatctgttttatgccgggttcagcaatgaactgccgccgctgcgtattttacgcaatatggggctgatggcggcgcagcgcgcaggcgtgctaaaacgtcaggcgcttaagtatgcgttggggttgtaacccgttgaatgccttacccggtttgtaaaaacgctcaattgcaggtcgggtaagcgtattgacatcttactttactgcaaataaagcacataaacctaatttccctttaaaatcaatttcataccaaggtgatgccatttcaattgtgcatacgttgtattggcaacgtactactttatgtagcatcagtaatgtggaactcattgattttacaagaatcgccagggtgattaatgcggcgataatccgataccacgtcagtgttgcatgttggacatcaaaccacagaatataaaaagtgatgatgtgaagaatgactttgctggacagggcgcgaatatagaatccacgcagcgccgttttcgaggaaaacgcgacattaatcagcgcgctttgtttttcttgcacagggatccctggcagatacactatccattccgcactattctggcgcaacatgacggcctttttctggtgcagtatatgtagcctcattgacactgccacggggtaaaccagacccaaaataatcaaccaggcggcgctggccgtgatatcaatgaaggtgaaagcgcagagcaagacgaccataaaaaatgttaatggccgcaaaaagagataccaacaaaactggtaattcattgtgaggttaccgaacgatccctgtaaggctttatcatagcgttttactgatagcagggcattaagggggaaacctctttcggaatttataaacgcagaaaagcaaaaagctcgccgaagcgagctttttaaaggtggctggggtacgaggattcgaacctcggaatgccggaatcagaatccggtgccttaccgcttggcgataccccaattgtcgtacttcttgcgctcattagcagagcgtctttaaaactggctggggtacgaggattcgaacctcggaatgccggaatcagaatccggtgccttaccgcttggcgataccccaacaaattattttcgaaccggtcgaatacctcgacgtgttctgaatatggtggctacgacgggattcgaacctgtgaccccatcattatgagtgatgtgctctaaccaactgagctacgtagccagatgatttcttcgatggctggggtacctggattcgaaccagggaatgccggtatcaaaaaccggtgccttaccgcttggcgataccccaataccgtcgcggtgaaccgcaaactcgaagaaatatggctggggtacctggattcgaaccagggaatgccggtatcaaaaaccggtgccttaccgcttggcgataccccatccgtacaacgcttatcggtgaatggtgcgggaggcgagacttgaactcgcacaccttgcggcgccagaacctaaatctggtgcgtctaccaatttcgccactcccgcaaaaaagatggtggctacgacgggattcgaacctgtgaccccatcattatgagtgatgtgctctaaccaactgagctacgtagccatctttttttcgcgttaccttatcggcgttgcggggcgcattatgcgtattgagccttgaagcgtcaacctctttttcatcgaaaaacgtcggaaagtgtctgtttggttaggttgcgaacagcgtggcgcaatattcggcaattattggttattaatcgtttttccgaaagtagtttgctataaaaaaagagcccctaagggctctttcgtcatcgttaatttactggtacgccgactgatgcacgccgaccgcgcggcctgacgggtcatccatcgttttgaatgcttcatcccactcaatggctttggcggaagaacaggccacggacgggccgccgggtacgcattccgccgcgctcggcaccgggaacagctcttcaaaaatttcgcggtacagatacgcctctttagacgacggcgtgttgtatggaaagcggaagcgggcggtttccagttgttgatcggaaatctgtttcgccgccacctctttcagcgtatcaatccagctgtaacctacgccgtcagagaattgctctttctgacgccacgcgacgcttgctggcagataagactcgaagcactcgcgcagcacgtgtttttccatcttgccgttgccgcacattttatcctgtgggttgatacgcatcgccacgtcgaggaattttttatccaggaacggtacgcgcgcttccacgccccaggcggacatcgctttgttggcgcgggcgcagtcatacatatgcagcgcctgtagcttacggaccgtctcttcatgtaactctttggcgttcggcgctttatggaagtacaggtagccgccaaacacctcatcggaaccttcgccggagagcaccattttgatgcccatcgctttgatcttacgcgacatcagatacatcggcgttgaggcgcggatagtggtcacgtcataggtttcaatgtggtagataacatcacgaatggcatcaaggccttcctgcacggtgaagtgaatttcatggtgcacggtgccgaggtggttagccacttcctgggccgccttcaggtcaggcgaaccttccagaccgaccgcaaaagagtgcaactgtggccaccaggcttcggagcgctcctgatcttcgacgcgacgggcggcgaattttttggtgattgccgaaataaccgacgagtccagaccgccggagagcagcacgccataagggacgtcggacatcaggtggcttttcacggattcttccagcgcctggcgcagcgcgtttttgtcggtaacgttgtcttttaccgcatcgaactcaaaccagtcgcgctgatagtactgacgaatttcgccgtctttgctccacaggtagctgcccgccgggaactctttaatggtgcggcagaccggggtcagcgctttcatttctgacgctacgtagaagttgccgaattcgtcataacccatatagagcggaataataccgatatggtcacgaccaatcagataagcgtctttttcgctgtcatacagggcgaaggcgaacatcccctgtaaatcgtcaaggaaatccggccctttttcctgatacagcgcgagaataacttcgcagtcggagcctgtctggaacgcgtaacgatcgccatactccgcgcgtaacgtctgatggttataaatttcaccgttcaccgccagtacgtgggtttttctggcgttatacaggggctgggcgccagcgttaacatcaacaatcgacaagcgttcatgtgcgagaatcgcgttatcgcaagcgtagatgccggaccagtccgggccgcgatggcgcatcaggcgtgacagttcaagggcttttttacgcagttccgctgcatctgttttgatatcgaatacgccgaaaatagaacacatagccttctccgttaatctgttgcgtcgtactttttgtatttgcttgactaaaaaatgccgcaaaggcgtggaaggcgcaaggggattacggtctgaaaaatgaaaaatgcaatcgtcattgttgattagtgaaaaatgattacgtattgcgcggatttattgatggatcttcagttttatcgtggattaattgaattatgtttttcctgatggcgtttcgcttatcagacctacaatgttgttcgaaccgtaggcctgaaagctatgcgtcatcaggcagaggacaggtttagataacgtctatctcggcgacggaagggtaaatccagcttgggcggaacggcatactgtcaatatcattgatcgttgatacgcctgaaagcaccagaatggtctccagaccggcctggaaccccgccagaatgtcggtgcgcaggttatcgccgacaataacggtctcttccgagtgcgcctgcattttgtttaacgccgcgcggatgatccacgggctgggtttgccgacataaaatggcttccggccggaaattttttcaatgcctgcgcacagcgcgccgcaggccggataaaagccgcgaccgtgggtatccgggttggtggcgataaagcgcgcgccattggcgacgaaaaatgctgctttatgcatcatgtcccagttgtaggagcgggtttctccaacgatgacaaaatcagggttcacatcggtaatggtaaaacccgctttatagagctcgtgaataagcgcgccttcgcccacgacatacgcttttttaccttcctgacggcgcagaaaatcggctgtcgccattgctgacgtataaaacacgctgtccggcacgttaacgccagcggtagcaaaacggttcgccagatcctggccggtttgcgatgggtaattggtcagcagcaccagcggcagacctttttccagaatccccgtcagaaattccgccgcaccgggtacggctacgttgtcgtgcatcagcacgccgtcgatatcgcagattacattcttgatggtcatgaactacccagggaatttgtgaataatccgatactataagagcgcatcaactttccagcaaacattgcagcaatgttccgttgagcatggcgcgtttaactaaggcaaatgcgccgatagcagaacggtgatccagcgtggagcgtaccaccggcaaatttttgcgaaatgcctttaacgcctgcgtattgatacagctttcgatagcgggtaacaggactttatcggcttcaatgatctcgccggcaatgacgattttttgcggattaaacaggttgatagcaatggcgatcgttttgcccaaatggcgaccaacatgctcaatgacttccgaggccaggctgtcgccccggtttgccgccttacagatggttttaatcgtgcagtcgtcaagcggaacacggctttgatacccttgtttaagcaaattcagcacccgttgttcaatcgccgcattggcggcaatggtttccagacagccgaaattaccgcagtggcagcgctcgcccagcggctccacctgaatatgcccaatttcaccgacgttgccgttacggccaatgaagatgcgtccgttggagataatcccggcgcctgtaccacgatgaacgcgcaccagaatcgagtcctcgcaatcctgactggcgccgaagtagtgttccgccagcgccaggctacggatatcgtgtcccacgaaacaggtaacgtgaaaccgtttttccagcgcttcgaccagtccccagttttcaacctgaatgtgcggcatgtaacgaatcacgccgctttccggatcgacaagccctggcaggatcaccgagatagcgatcaattcacgaattttacgctgacagctatcaataaagacggcgatagtgttgagcagcgcatgttccagcgtctcctgggtgcgctccggcagcggataatgctcctcagcgaccactttactgctcagatcgtagagcgttaaagtggtgtcatgacgccccaggcgaacgccaatggcgtggaagttacgggtttccgtgacgatagagatagcgcggcggcctccggtagaggcctgctgatcgacttctttgatcagcccgcgttcaatgagttgacgcgtaattttcgttacgctggcgggagcaagctggctttgctcggcaatttgtatgcgcgagataggaccatgctggtcaatcaggcggtaaacggccgcgctgttaagctgttttacgagatcaacgttacctatctgagcttgtccgcctggtgtcatattctcacttactcaagtcaacgacctcgtcaccattaacgatggtcttgataattttaaaatcgtgggtgaacgcggtcaggttggcgactttacccggcgcaatgctaccgagatgtttatcaacgccgatagcgcgagccggatagagcgttgccatgcgcagcacttcatccagcgcgatgccgcaatgcgcgaccaggttgcgtacgccttcaatcatggttaaggacgaaccgctcaacgtaccgttttcatccacacacagtccattgcggtagtatattgttttacctgcgaaaatgaactgctcaatattggcccccgccggtgcggtggcgtctgtcaccagacaaagtttgtcgcctttcaggcgtttggcattgcgaatgttggcgtagtcgacatgcagaccatcggcgataacgccgcaataaatatccgcttcgtccagaacagcgccagcaaggcccggctcacgccctgtaatgtacggcatcgcgttaaacaggtgagtcgcaaaggtaatcccggcgcggaagcccgctttcgcctcttttaacgtcgcgttggagtgacctgcggaaaccacaatgcccgcattcgccagtttagcgattacgtcagcaggcaccatttccggcgcgagtgtgactttggtgatgacgtcggcattatcgcataagaaatcgaccagcgcagcgtctggtttacgcacgaaatcaggattatgggtgcctttttttaccagattaagccaggggccttccaggtggagacccagcgcctggtgcggatgtttttccaggtattcgcgcatgacgcgaatgccctgtttcatcaattcgtcgctggtagtgataagcgttggcagaaagttagtacagcccgatttttcattggctttctgcataatttccagcgtttcaacgctgacggcttctgcggtatcgttaaactgcacgccgccgcagccgtttagctgcacatcaataaaaccgggggagagaatggccccattcaatgagcgttgttctattcccggcggcagttcggccatcggacaaacgcggtcaatcaggccattagcgacaacaagcgcatggtcatcaagaatttcgtgaccggtaaagatccggccctgggttaaagcatacattccgacccccgatatcaaaaatttaccgccccgcattgactggcggggcggagacaacattacagacctttaatattttctgcttctaattcattgaaatatttcaatgttttaactttaagttccattgtggacggctcatcgcataccacaaccgctttcggatggagttgcaggcagctaatggtccacatgtggttgacgttgccttcaaccgccgcctgcagcgcctgggctttctgatggcccagcaccagaatcatcacttcttccgcatccagcagagtacccacgcctaccgtcagcgcgtatttcggcacctggtttacgtcgccgtcaaagaagcgggagttcgctacgcgagtatcatgggttaacgttttgatacgggtgcgggaagccagggaagacgccggttcgttaaaggcgatgtgaccgtcgttgccgacgccgcccataaacagatggattttaccgtaagaacgaattttttcttcatattgacggcattctgcatcgatatccggtgcgttaccgttgagaagattgatgttttctgctggaatatcaacgtgatcgaaaaagttacgatgcataaagctgtggtagctttccggatgctctttcggcaggccaacatattcgtccatattaaaggtgaccacatgcttaaagctgacctcgcccgctttgtgcatctcaaccagcgctttgtacgccgttagcggcgtgccgccggtaggcagtccaaggacaaacggacgatcggcggtcggtttgaacgcattaatacggttaacgatatggcgagcggcccatttgccaacctgttctgcggtactcagggggatcagtctcattcttcacctcaataatcaatgtcaaaatttggcggatcgtattaagcgtaacctggatatccagggttcgtgttcaatccgtcctgattttttgaatcataaaataagttttctgtgttagccagtggatggtaggggtgattacgatatttagtgattataatcacaaaaaacacccgtttaatttgcgaggcgaattaattttccacacactctgcagaagatgatctcaccgttcgattacagaacatcacgtttttaacgtttgcagcacaataaaaaacggcttcaaagaagccatatcggcgtctcgtagggggaataagatgaatattttaggttttttccagcggctgggtagggcgttgcagctccctatcgccgtgttgccggtggcagcgttgttgctgcgattcggccaaccagatttgctgaatatgccgtttatcgcgcaagcgggcgggtctattttcgataacctggcgctggttttcgctatcggcgtggcctccagttggtctaaagatagcgcgggcgcggcagcgctggcgggagccgtgggttacttcgtcatgaccaaagcgatggtgacgattaacccggaaatcaacatgggcgtgctggcggggattattaccggtctggtcggcggcgcggtttataatcgctggtctggtatcaaactgcctgattttctcagtttcttcggtggaaaacgttttgtaccgatcgcaacgggctttttctgtctggtgctggccgctattttcggttacgtctggccgccggtacagcatggcatccatgcgggcggtgaatggatcgtttccgcaggcgcgctgggttccggtatctttggcttcatcaaccgtctgctgatccccaccggtctgcatcaggtactgaacaccatcgcctggttccagattggcgaattcaccaatgccgcaggcactgtattccacggcgacatcaaccgcttctatgctggcgacggcacggcggggatgtttatgtccggcttcttcccgatcatgatgtttggtctgccgggcgccgctctggcgatgtatttcgccgcgccgaaagaacgtcgtccgatggtgggcggtatgctgctgtctgtcgcgatcaccgcgtttctgaccggcgtaaccgagccgctggaattcctgtttatgttcctggcgccgctgctgtacctcctgcacgccattttgactggtatcagcctgttcgtcgcgacgttgctgggtatccatgcgggcttctctttctcggcaggcgcgatcgactatgttctgatgtataacctgccagcggccagcaataacgtctggatgttgctggtgatgggcgttgtattctttatcatctacttcctgctgttcagcgcggttattcgtatgtttaacctgaaaacgccgggccgcgaagataaagttgatgagatggtaacggaagaagccaacagcaacaccgaagaagggttaacgcaactggcgaccagctatattgctgcggttggcggtacggacaacctgaaagcgatcgatgcgtgtattacccgtctgcgcctgaccgtgaatgactctgctcgcgttaacgatgcggcctgcaaacgcctcggcgcttccggcgtggtgaaactgaacaaacagaccattcaggttattgtcggcgcgaaagcggaatcgattggcgatgaaatgaagaaagtggtggcgcggggaccggtcgcggcagcgtctgctgatgcggctcacgttgcaacacctgctccggcggccaaaccccaggcggtgccgaatgcggtaactatcgctgaactggtctctccgattaccggtgaggtagtggcgctggatcaggtaccggatgaagctttcgccagcaaagcggtcggcgacggcgtggcggtgaaacccaccgataaaaccgtggtttctccggcggcgggtactatcgtgaaaatcttcaacactaaccacgcgttctgtctggaaaccgaaaaaggcgcggagatcgttgtccatatgggtatcgataccgtcgcgctgaacggtcagggctttaagcgtctggtagaagagggtgcggaagtcacggcgggtcagccggtgctggaactggatctggacttcctgaatgccaatgcgcgttccatgataagcccggttgtttgcagcaacagcgatgacttcagcgctctggtcatcaaagcggatggtcacgtggtagcgggtaaaacgccactgtacgagatcaagagcaaataatcgcttcctggccggataaggcgtaagacgccatccggcgatatcacaggaaacataagcggcagagggaaaccttcgccgcttttttttaccgcaattagccccaatattttctgcaaagccactttttaagtaactaaaggttgtcagtctgtccggcttataagatcatatgccgttatacgttgtttacgctttgaggaatccacgatgagtgaggctgaagcccgcccgactaactttattcgtcagattattgatgaagatctggcgagtggtaaacataccactgtccatacccgttttccgccggagccgaatggctatctgcatatcggccacgcgaaatctatctgcctgaactttggcatcgcgcaagattatcagggccagtgcaacctgcgtttcgatgacaccaacccggtaaaagaagatatcgagtacgttgattcgatcaaaaacgacgtcgagtggttaggctttcactggtctggcgatattcgctactcctccgattactttgaccaactgcacgcctatgcggtcgagctaatcaataaaggcctggcctatgttgatgagctgacgccggagcagatccgtgaataccgcggtacgctgaccgcgccgggtaaaaacagcccgttccgcgatcgcagcgtcgaagagaacctcgcgctatttgaaaaaatgcgtaccggcggttttgaagagggtaaagcctgtctgcgcgctaaaatcgacatggcgtcgccgtttatcgtgatgcgcgatccggtgctgtatcgcattaaattcgccgagcatcatcagactggcaacaagtggtgcatctatccgatgtacgactttactcactgcatcagcgatgcgctggaaggcattactcattctctgtgtacgctggagttccaggataaccgtcgtctgtacgactgggtgctggacaacatcaccattccggttcacccgcgccagtacgaattctcgcgcctgaatctggaatacaccgtgatgtccaagcgtaagctgaacctgctggtgaccgacaaacacgtcgaaggttgggacgatccgcgtatgccgactatttccggtctgcgccgtcgcggctataccgcggcttctattcgtgagttctgcaaacgcatcggcgtcaccaagcaggacaacactattgagatggcgtcgctggaatcctgcattcgcgaagatctgaacgaaaacgcgccgcgcgcgatggcggtaatcgatccggtaaaactggttatcgaaaattacccgcagggtgagagcgaaatggttaccatgcctaaccatccgaataaaccggagatgggcagccgtgaagtgccgtttagcggtgagatctggatcgatcgcgcagatttccgcgaagaagcgaacaaacagtacaaacgtctggtgatgggcaaagaagtgcgtctgcgtaatgcctacgtcattaaagcggagcgcgtagagaaggatgccgaagggaatatcaccaccatcttctgtacctatgatgctgatacgctgagtaaagatccggctgacgggcgtaaagtgaaaggcgtaatccactgggttagcgcagcacatgcgctgccgattgaaattcgtctctacgaccgtctgttcagcgtgccgaatccgggcgccgcggaggacttcctgtctgttatcaaccccgaatcattagtgattaagcaggggtatggcgagccgtcgctgaaagcggcggtagcaggaaaagctttccagtttgaacgtgaaggctacttctgcctcgacagccgctatgcaacggccgataagctggtctttaaccgcaccgtgggcctgcgtgatacctgggcgaaagcgggcgagtaagcactgcgccaacaggcgaatgctgtaaaaataccttgtcaacgccgcgttctgcggcgttttttctctgcatttctaagtcgattctcttttttgcgaggcgaattaattattctctgaaaattattgatctgataaatgattattaatctaaatgttataagcgtcaggtcaacaggagacaattattttcatgcctatggaaaacaagtcaattttctttctggcggtctgcttcccccaccagcagtcgaatgtaacagaaagcaattaaatatgtgcggttgctcatattattacatactggttacagaaagagattgataattcgcatcgcgaaaaatagtctatttaacgtagtaaatgaggtttctcagcgctactttttattttttcgctgttcgcttttgtcggcagcaatttatacgtcaaagaggattaacttatgcgtacgtttagtggcaaacgtagtacgctggctctggctatcgccggtatcacagcaatgtcggggtggatcgttgttccgcaggcgcaagcctccggctttttcgacgactccacgttaacgggcggcatctattattggcagcgtgaacgcgatcgcaaagatgtgaccgacggcgacaaatataaaactaacctttctcatgcgacctggaacgctaacctggattttcagtctggttacgctgcggatatgttcggtctggatatcgcggcgtttaccgcgattgaaatggcagaaaacggcgacagcggtcatccaaacgaaattgccttctcgaaaaagaataaaggctacgacgaagactattccggcgataagagcggtatcagtctttataaagccgcagcgaaatttaaatatggcccggtctgggcgcgcgccggttatattcagcctaccggtcagacgctgttagcgccgcactggagttttatgccgggtacctatcagggtgcggaagccggcgccagttttgactatggcgatgcgggcgcgttaagtttttcctacatgtggactaacgaatataaagcgccgtggcataccgaaatggataagttttatcaggcggataaaaaaaccaatgtggattatctccactccatcggcgcgaagtacgacttcaaaaatgatctggtgctggaagcggcgtttggtcagtccgaaggctatgtcgatcaatatttcgcgaaggccagctataaatttgatttaggcggcaatccgttcaccaccagttaccagttctacggcgcgcgcgacaaagtagacgatcgcagcgtgaatgatatttacgacggtacggcctggctgcaggcgttgaccttcggctacaaagtcgcggaagtggttgacctgcgtctggaaggcacctgggtgaaagcggacggtcagcagggctattttctgcaacgtatgacgccaacctacgcctcttcaaacggtcgtctggatatctggtgggataaccgctccgactttaacgctaacggtgaaaaggcggttttcttcggcgcgatgtatgacctgaaaaactggaatctgccgggctgggctgtgggtgcgtcttacgtttacgcctgggatgctaaaccggcaacctggcaaagtaacccggatgcttactacgacaaaaaccgcactatcgaagagtcctcatacagtctggatgcggtttataccctgcaggaggggcgtgccaaaggcaccatgttcaaactgcactttaccgaatatgacaaccactccaatattccaagctggggcggtggttacggcaacatcttccaggatgaacgtgacgtgaaatttatcgttattgcgccattcactattttctgatgtcagatgcggcaggctgccggcctgccgcgctgttgaggaacgacctatgaaaaaaattttactcatcgccagcatgaccgccggtttgacggcctgcgcgtcatcacccgcgccggaagaagatagccggctgaaagaggcgtacagcgcctgtatcaataccgcacagggctcgcctgagaagatagaggcctgccaaagcgtgctgaatgtccttaaaaaagagcgcagacatcagcaatttgctaacgaagaaagcgtgcgggtactggactatcagcagtgcattcaggcgacgcgcacgggtaacgatcaggcggtcaaggctgactgcgataaggtctggcaggaaattcgcagtcataataacgtgcaataaaaccctgccttgccacccacgggcgaatgttttccgcccgtggttttttcaggctttattttctgccgcgatatagccgcgactcagacgtacaaacagcatcgccgtcgcggcaagtccacataacgctgcgcacatcagccaccagccgggcgagcttttatcgccggttaactttaccagcgcggtagagatggccggcgtcaggccgccaaaaatcgccgtcgccaggctaaaggccagcgagaaaccaacggtacgcacatagactggcatcacttcggttaacgccgcgaccattgcgccgttatacatgccaaaaaagaaagagaaccacagcagtaccagcgtcatgcgggtaaagtcgggcgcggcggtcagccactgcatgacgggccaggtggtgatcagcgccagcaacgtaatgcccattaacacagcgcgacggccaatccggtcggaaatcgcgccgccaatgggtaaccagataaaattggacacccccactaacatggtgacgatcaaactgtcccgcgcgctgagattaagcacggttctgccataggtcggcgtataaacggtgataaaataaaacgttgtggtggtcatcgccaccagcagcgttccggctgtaataatgcgccagtttttggcgatagttgcaaaaatttccctggtgtcggggcgatgcttgcgttgtaaaaacgcttctgtttcttgtaatgaacgacgtaaaacaaaaatcagcggaatgatcatacagccgataaagaacggaattcgccagccccactccgatatcgcgtcgtgtcccagcgtgatattcaggctataaccaatcaacgcggcaacaacgatcgcgacctgctgactggcggattgccagctggtataaaaccctttattgcctggcgttgcgatttcggacagatagaccgagacgccgcctaactcaacgcccgcagaaaatccttgtaataaccggcccaacagcaccaacgcaggcgctgccaggccgatcgtttggtagccggggacgagggcgatgagcaacgtaccgcagcccataatcgccagtgtcaccatcagccctttacggcgtccgattctgtcaatataggcgccaagcacaatcgcgccgacggggcgcattaaaaaaccggagccaaagacggcaaaggtcaacattaatgaggcaaattcgctttccgccggaaaaaacgttctggcgatataggtggcgtaaaatccgaacaagaaaaaatcaaactgttcaaggaaattgccgcttgtcacgcgcagtattgcgccgaacgtgccggcgcgcgatgttgcaggtgtgtgttgtgccatagggtttgctctccactgtctttattgttttatgggtaagatgttgcgggtcagttgcctgtatcccccgcatgttttccgcgtcgcttctcaactgcccatttgagtaaggccgcgcagcggaaaaatccgtgggcgaattttccgtagggaagggtgagaaagagcgccatcaccacgcctaaatggagcgccagcagtatgcccattccgctggtgtctctgcctgccagcagcgccagcccggtcagactggttaagaacagcagcagaataaagccgcgatccatgggtttctggcgcgcatcgccatgtaacggcgaccgccgcagattgagccacagtagcccggccgggccgataagcagaccgataccgcccagcgtgccgagcatgaccggcaggctaaaaaacgggtagggcgcttcccaaccggcgacgtagtgatagcccgtcgccacgaccgtggcggcaaaacagagcataaaaccgtaaaaggtaaagtgatgaaagcgacggcgcagcagcgtgaacgcatcgtccgcttcgttacagcctttgccgtgaccgccgtcgagatatttcagcgttaacgcattgtgcgacgcttccgcaatctctgccgaacgcggtacgcccggcgagatctcacgccagaagcggattacgcccgccataagcaaaccgattgccagcacaaaaactgagccgaacatccatgccagcaggctatgcggaaaaatttgatagaagtcaccggccagcggcggatgaatcagcgaccctttcagcgccatcgccagtaataaaaagagcgtcagaccgactatcagcgccagcgcgacggtgatccccgcccgacggtataacgcgccaaaagcggcgggctgggcatactgttgatacgtctccaggcgggcttgcgccatcgctttcggcacgttaatggcaaattcatggggcggcgcgtactggcacgcgtgcaggcaggcgccgcagttatgacataaattcgccagataatgaatatcggctttaccgaattcgagccgctgggtcatcgccggaaataccgcgcaaaaaccttcgcagtagcgacacgcgttacacacttgcatgacgcgttcgacctcggcttccggttcggtaagcacggtggcctcaatgattaatttttcaagctgtttcatgctgcgcctccttgtgcgccgcgcgggcggcttctattcccgcaatgcggccaaaggttgtgccgatagacatgcctacgcctgcggtataccccttgcccagaacatttcctgccatcatctcgccggcaacaaacaggttgcggcttggatgaccggcaaaatgcaccgcggcacgttcattgactttcagacccaggtaggtaaacgtgatgccgggtcgcagcgcataaccgtagtagggcggcgcatcaagcgggcgcgcccagtgggttttcgccggcgtcaggtttttagtggcgcagtcatcaagcaaggtatgatcaaaatgaccgggctggcaggcctggttatactgcgtgacggtatgggtaaatttttccgcgtccagccccaactggcaggccagctcagccagcgtattggcctgcgcgccaggaaaaaccggcggcataaagtggccgatggctttgctgtcaataatcgaatagccaatttgtcctggctgttgagcaaccagccgcccccaaatggcgtaacgcttcggccagaaatcttcgccttcatcataaaaacgttcggcgtcgcgattcacgacaatacccagcgatacgcaatccacgcgagtacaaataccgccgtcgtacagcggcgccctggcatcaatcgctacgcagtgcgactgggacggatcgccaatgatatccgcgccggcatccatcataaatttgagtaatacgccctggttaaaacgcgtgccgcgaatcaggaaattatccgcgggccattcgccgcgggcgttttctccccaggcctcccgcagccattcacggtttgattcgaaaccgccagccgctaatacgcaggctttggcggtaatccgttcgctacccgccagcgccgccacgaattcgccgtcatgaagttcaagcgcgtgaaccggcgtgttatagcgaacctgtacgcccagccgttcggcgctacggtaataggcattgacgagcgctttcccgccgcccataaaaaacgcattggtgcgcgcaacgtggagcgccccagatagtggcggttgaaagttaacgccatgtttgcgcatccagtcgcggcattgcgaagaggtgcgaatgaccagccgcgccagcgcctcgttggtgttgccgtcggtgactcgccacagatcctgccagaattcctcttcaggatagctttctaccagcacatcctgcggcgcatcatgcatacagcgcaggtttcgtgtgtgctgagaatttccgccgcgccattcccgcggggcagcctccagcagcagaaccgatgcgcccgcttcccgtgcggtcagggcggcgcataatgcggcattgcctccgcctatcaccagtacatcaaccatcttatactcccgtaccatttaactatttgttaaatttgtaattgaaatgtatacggataaataagcggtgcgctatcaggtagcgctaaacaggggtttagtaagcgtaaagggttgcgcctggccattcaccggcgtcgactaactgacgcataactttggtaaggactactctggcggcaaggccggcgggcgtcagttcatcatccgacaggctgactaaaaaattggggcggctgagtaccggattatggacgccgatcacgcgtagcgcgtcgttatccagatgagaaatcgccgcgccgggctgcaacgtggcgccaagaccgtcgcgcacggcgcgcatcaacaacgccaggccgtcaatttccgcgacgatttcaacgttaagcgcatgttcctggcagacagcgtccagcctgccgcgcagcccatgtccctggcttggcataatgagcggaatgcctgccagttgttcaggtgtgatcgggttatcaggaagcgccgccagcagggcatgggagccaatcagaaaaagctgttcttcaaggatcggtctggcgctccagcgcaggattttatctttttgaaagacaatggctaaatcaatctggcgggtattgatcattctttccagattaccggacaagctttccaccacatgcagtcggacatcggcatagttttcctgcatggcatggataaacggtatacccagtatggaggcggtactgggggccattcctacgctcacatgaccggaaaggcgcgcttctctggcggcgagaatcgcgtcgtcggcatgacgcagggcgagttgcgcctgtgaataaaaggccagcccggcgttggttggcgttacgccgcgcgaagtgcgctgcagcagacggatggcgagctcgttttccagacgggacatctgttgacttaatgctgaaacgccaatatcaagatcctgtgcggcgctgcccatactgccggtttcaataatacgcacgaaatagcgtaactggcgaagctccattcctgctctcctgagatgcgatagcgttttttacattaaatcaacatcaagcggcaggaaagaggaggatataaaaaagccaaccgggcggttggctcttcgaaagatttacacttatttagtcgcgtcatcgtgcgcgtgctcgtcttcgcggcagtcgccttcagcgcagtggccgtaaagatagaggctgtgattagttaaacgaataccgtgtttcgccgcaatttcacgctggcgcgcttcaatagagtcatcactaaattcaatcacttttccgcaatcaaggcagataagatggtcgtgatgatgctgttgcgtcagttcaaaaacggatttaccgccttcaaaattatggcgggtcacgataccggcatcgtcaaactggttcagcacacggtatacggttgccagaccgatttcttcacccatgtcgatcaggcgtttgtataaatcttccgcactgacgtgatggttatctggttcctgaagaacttccagaatttttaaacgaggaagcgttactttcaggccagccttctttaatgcggtattgttgtcagtcatgcggaatctgtcctgttgctaaacgattcacttcattagagaagtgacagaaattgcactcaagataatgcgtatcattataggactgccatgccgaaatgaaaaccgcaagtctctcgcagatgttaataaaactgtggttttgcctgcaaattctggcgccacctgattacacccggacattgtacagggatgggtgcgaaagttacaaatttgtagcaattattttgattggtcttgtctattgatgcggcgcagatataacgctgcgccgcataagattaggcgttgaggatgtcgtcgaggtgcaattcagccgaaacttgcttaacccatttttcaacacgctcggcggtcagttcaggctgacggtcttcgtcaatcgccagaccgacaaaatgatcgtcgtcagccagacctttagaggcttcaaaatgatagcctgcggttggccagtgacccacaatcgtggcgccgcgcggctcaataatgtcgcgaatcgtgcccagcgcatcacagaagtattccgcgtagtcttcctgatcgccacagccaaacagcgccaccagcttaccgttaaagtcaatctcttcgagagtcgggaagaagtcatcccagtcacattgcgcttcgccataataccaggttgggatgcccagcagcagaatgtcatacccttccaggtcttctttactgctttttgcaatgtcatgcacatcggcaacgtctttaccaagctgtttttgaatcatttttgcgatattttcggtattaccggtgtcgctgccgaaaaagatgccagtgattgccatgagtaaaataacctcttgaaacttattgaaatggtggtggcgaattgcccacggataagggcaatcatagcagaacaggcagatatgcggaaacagcaatcacgcgggactgcacgctctgctacacgaaatatgaaacaaaacttattttcagactaaaccctagccgcgcagcgccataagctgcttcattaatatttcttcaatgagctcgctgcggctaatgttgcgcgcttcggccagctcattcagcgcgtcaaccgcttgtgcgttgagttttaattcgacacgcttgaggccacgaactttgtcgcgttttaactggttgcgcttgttgatgcgtaactgttcatcgcgcgaaagcggattcgttttaggtcgtcccgggcgacgctcgtgcgcgaacagatctaatgtcgtacggtccgtttgttctttggccatgattttggtgacttcgggggaaacaatcagccaggcttatgcccggatggatagcgcgccatcatacatcagcgaggaagcgacgccaacgcccgcgcgcgtaatcgcgcacaggcgatgagtttttaatcagttagcgtttatcgtgcagataacggcggatggcgcgcagaaccgcctctggtttttcggcatgtacccagtggcccgcgccggcgatcacatgcgcgcgcgccaaagggaattgtgccagtagcgtgtcgcggtacgcttcggtcacgtacggcgagttaccgcctggaataaacagcgccggatgttcccagggcggaatggtttcccagccgacgatatgcggatactgctcccataataccggaacattaaaacgccattcgccttcagcccaggattttaacagaaactggatcacgccttcttcgttgaggtgctggcgcataatccctgccgcctgttggcgggatgtcgcgtcggattcgctgacggcgttaatggccgcgaaaatgcgatcgtggcggcgaacgtgataatccacgggggcgatatcaatcgcgaccagacgatcgatgcgatcgggcgccagcgccgtcagcgccattaccgcttttccacccatggaatgaccaataaacgtcgctttttcaatctgctgcgcgtcaagcgtatccagaagatcctgggccattgccggataatccatgaccggatcgcgcggcgataaaccatgattgcgcatatcgacctgaataatgtcgtgatcggtcaccagatcgcgcgccagtacgccgaggttgtccaggctgccaaacaggccatgaacgagaacgatgggggaattattgtgcaggttttgtgcagattgcgctcggatgtttaatttcatggcaaagttctttttttcgctctgtcgggttagggtattatgttgaccattctgccactgggctgcaacctctaaggtttactccgagtttttttgtcagccgggcttaacgctatccgctgttgggatttgttcctataatcccaatgacttgtattcagcaaagacatcgcactggattaagatgaaaacgattgaagttgatgatgaactctatagctatattgccagccacaccaagcatatcggcgagagcgcatccgacattttacggcgtatgttgaagttttccgccacgacacagccaacggcttcagcggtgaaggggacgcctgcggcgcaacccgttgccgaagcgaaaccggttaacccggtaaaagacaaagttcgcgcgatgcgtgagctgttgttgtctgacgaatatgccgagcagaaaaaagcggtcaaccgctttatgctgattctgactacactctattcactggatcaccacgcgtttgcggaggcgacggagtcgttgcatggccgcacgcgcgtctattttgcggcggatgaacaaacgctgctgaaaaatgggaatcaaactaaacctaagcacgttcccggcacgccgtactgggtgatcaccaacaccaacaccggccgtaaatgcagcatgatcgaacacatcatgcagtcaatgcaattcccggcggaattgattgaaaaggtttgcggaacaatttaatccttgcattagaaggaccaggcaatggcaatccacaaccgcgcaggacaacccgcgcaacagagtgatttgattaacgtcgcccaactgacggcgcagtattatgtactgaaaccggaggcagggaatgcagaacatgccgtgaaatttggcacttccggccatcgcggcagcgcaggtcgtcacagtttcaacgaaccgcatattctggcgatcgcccaggcgattgctgaagagcgggcgaaaaatggcattaccggcccctgctatgtggggaaagacacccatgcgctctcggaaccggccttcatttccgtgctggaagtgctggcggcaaacggcgtagacgttatcgtgcaggaaaataatggctttacgccaacgcctgccgtgtcaaatgctatcctggtccataacaaaaaaggcggcccgctggctgatggtattgtcattacgccgtcgcacaacccgccggaagatggcggtattaaatataatccgcccaatggcggcccggcggataccaacgtcactaaagtggtagaagatcgcgccaatgcgctgctggcgggcggcctgcaaggcgttaagcgcatctctctggatgcggcaatggcctcgggccacgttaaagcggtagatctggtacagccgtttgtcgaagggctggcggatatcgttgatatggcggcgattcagaaagccggtctgacgctgggtgtcgatccgctgggcggctccggtattgaatactggaaacgtatcgctgagcattacaaacttaacctgacgttagttaacgatcaggttgatcaaaccttccgctttatgcaccttgataaagacggcgcgatccgtatggattgctcctccgaatgtgcgatggcgggtttgctggcgctgcgtgacaagtttgacctggccttcgccaacgacccggactacgaccgtcatggcatcgtgacgcctgcagggctgatgaacccgaaccattatctggcggtcgccattaactatctgttccagcatcgtccgctatggggcaaagacgtggctgtcggtaaaacgctggtctcttccgcgatgattgaccgcgtggtgaatgatttgggacgcaagctggtagaagtgccggttggcttcaaatggtttgttgacggtttgttcgacggcagctttggtttcggcggggaagagagcgcgggcgcttcgttcctgcgtttcgacggtacgccgtggtctaccgataaagacggtatcatcatgtgcctgctggcggcggaaatcaccgccgttaccgggaaaaacccgcaagagcattacaatgaactggcagcgcgttttggcgccccgagctataaccgtctgcaggcgagcgcgacctccgcgcagaaagcggcattgtctaaactgtctccggaaatggtgagcgccagcacgctggcaggcgacccgatcaccgcgcgtcttaccgcagcgccgggtaatggcgcatcgattggcggcctgaaggtaatgaccgataacggctggttcgccgcgcgtccatccggtacggaagacgcttacaagatctattgcgaaagcttcctgggggaagaacatcgcaagcagattgagaaagaagccgttgaaatcgttagcgaagtattgaaaaacgcctgatgggcgatatggaagaaaaaggagccttacggctccttttttgtattaacggcgctgcgcttatcaggcctgtaaaccgcctccaggccggataaggcgcttgtgatatctgacttattcgctctgagtcgccagatgtcggcggcaggtgagggcgtcgcattcgatacgcaccacgcaaaccgctttcatcatatcttcccgataactgaaggtttttcccggatcggtctgacgcataatgacgtccaggccgtagcgcatctcctcgcgcgtttgcaatatcgatgccagtccggtggcgaaaacgctggtgtaggcgtagctataatcacaggggtcatcggcacgtagtaatgcatggtcgccgtccatttcaatgcatactgccgggttcttacgtaacagacgcatctttttcccggtgcgtgcgccgtgaaaataaaatatccagcgtccgttctgatactcgtagccaaaatttacggggacaacatacgggcagagattgtcgttaaaccctatccgacacacttcgtgtttactgagaatagccagtatttctgctatatcagtgacttcccgctctggattactcatttctattatcttattcaaagagtgaaaatgcccggactaccgttaccgcagcccgggcgcgccatcagccgtgtttatttttcaattcaaaacgcggtgagaccaggccgtataacgtccagccgaggaaggtcacaattgagccgtacagcatggcttcttcaccggaggaatagagcgcgtagaagctatacatggcgccaacgaaggccacgaagttagcgactttcgcttttgatgacggcacattcgccattttctgaatgataaccagcgcggccatcgacagaatatacggaataatgttcgtcaccaccgccaggttaaccaggacgttaaactgactattcagcgacgggctaatggtcatcagcgacaggccagtctgaataatcacaatgatcaacatcccctgaaccggcgcgtcgactttcgttacacgagagaagactttcgggaaatagccttcgtcagcggaggatttaaagacctgagcgatagtgaactgccagcccagcagcgagccgcagcaggacattaccatcagcgccatgatcactttacctaccgcaggcgtgaacatctgtgcaaacgccagaccaaacggcgccgtggagttcgccagatccatgttcggcacaatcccggcaatcacgttagtcgaaacgatatagatgaccgccgcgcccagcgtaccgcccagtaccgcaatggggacgttcttttccggattctcgaccacgtctgcgttggcgcaggcggattccagtccaagaaatgcccataacgtcatggcgatggaagaaccgaccgcgctaaagaacggaacatggtgcgggttccatgacgctacgtacatgctggggctaaaccagaaccagccaatgatgcacaggccgacaaccggaatgatgacgccccaaacggtaacgctactgatctgtccggtaatacgcgcgccgccaaagtttgcgatggtacaaacccacaatacggcgatagtcgccagaccgatctggagcggcgtcagcgcggcgccgaacagttcggtaccatagccgacagcggagatggcgatagccacgttggcgatcagcagcgagacgccgtaggtatagttcgccataaagttgccggatttaccgaaggcatattcggcgtaaccgcccatgccgccggatttacggctaaacataccgcatttcgcaaacgcccaggccagtgccatcgagccgacggcggtgaccagccaggagataatggatatcgtgccgacttcagacagtttggtcggtagcatgatgatcccggagcccatcatgttgaccatagtcagaattgtgagctgcacgacacccattttattggatttaggtttactcataatttttcctccttcagcagggagcgctgtgcgtcacgaggtttaatgacgtagcaccagacctgcttacggccgtcgtgttcttcgatataaacgccctgcagttcaggcgcaaagcccggcagcaggttgatcccttcttccagggcgctgaagtaacgcaggacagaaccgccccagatttcacccggaactacacacagcactcccggcgggtaaggcagagcgccttcagccgcgatacgaccttccgcttccggcaggcgaaccagttcgacctcgccgcgcagataggcatagttggcctcttgcggattcatactgactttcgggaaatgcgatttacggaacatctctttttgcagctgtttcacgttgtgccgcgcatagagatcgtgcatctcctggcaaagctgacgcagggtatagccggcataacgcgcttcatgctgtttgtagatggacggtaatacttccgctaacggcgcatcagcttccagcagtttttcgaaacgagccagcagggcgacaagctgttgtaacttcgccatgtcttctgccggcgtcagcaggaacagaatggagttgaggtcgcatttttccggcacaacgccgttctcgcgcaggaagttggcgaggatcgtggcaggaacgccaaagtcttcatattcgccgctcgctgcattaatgcccggtgtggtgagcagcagtttgcaagggtcgacaaagtactgatgttcggcatagccttcaaacgcatgccagtgttctcccggaacgaagtggaagaagtgcagatcgctggcgatctctgacgtcgggtatgactgccacggcttaccatcaatcagttccggtacgaacggacggatgtgatgacagttttcgaggatcaatttacgggcatcgatgccgttaaccacgcaatccatccacatattgcgaccgctgacgccttcgtgcattttggcgttaacgtccagcgcggcgaacagcggatagaacgggctggtggaggcgtgcatcataaaggcgttgttcatgcgcttatgcggaacgtagcgcgattgccctttgatatggctatcttttttatggatctgcgaggtctgggagaaaccggcttgttgtttgtgaacggactgcgtcaccagaatacccggatcgttttcgttcagttccagcagcagcggcgaacaatcggccatcatcggaataaattgttcatagccgacccaggcggagtcaaacaggatgtagtcgcacagatgaccaattttatcgacgacctgacgggcgttataaatggtaccgtcgtaggtgcctaactggatgacggccagacggaatggacgtgcttcgcgggcacgctgcggcgcgacttcgctaatcagctcgcgcaggtaatcttcttcgaagcagtgagcgtcgatcccgccgataaaaccatacgggttacgcgcggtttccagataaactggcgttgcgcccgcctgcaataatgcgccgtggtggttagatttgtggttgttacggtcaaacagtaccagatcgcccggcgttaacagcgcgttgagtacgactttgttagaggaggaggtcccgttcagcacaaagtaggtcttatcggcgttaaagactttcgccgcatgttgctgcgcaatgcaaggcgcgccttcgtgaatcagcagatcgcccatcgccacgtccgcgttgcataggtcggagcggaagagcgtttcgccaaagtattccacgaactgattaccggcaggatgacggcggaagaattcgccgccctgatgccccgggcagtcaaatgcgctgttgccctggttgacataatccaccagcgcgcggaaaaacggcggacgtaactgcgtttcgtagtggcttgctgcggtttccaactggcgaccatagaaggcagtacgggattcattatattcgaatacaccagagatacgcggcaaatactcaggcggtacgcgcccttcgtcatgtgtcgcgacaaacacgggaataccgtaacccgttgcgtcgatttcatcgagttttccgtgttcaatgtcgtcaatggataacacgatggcagccacgtcgatgaaacgactctcatcaacatttacaatattacggtgtgtagaaaaacaatccgggcaatgacggctaacggcaatttttaattctgacatttttcatctctttatttcaggtaatagcaggccctcaatttctcgcatgagaaactgattcttccggaaaaaatcaaagctatcccgctgataaaaaaatcagtaaattagctttattttagatgtaataaatcccaacccgtccggttgcaggaaattcaggatttaaggagttgagtactacgatatacaggcagaaaccgcgataactaaaattgcgctgagtcggaatttcttctgtcaaaccacatggttagctggctgggcgtaaaggaattaccgtactgtcgcttttaacaattcgagttatttaggcaatagacctgaatgacataagggtcggaaagacctgtatgctgaagtacccgtagcagaaaaactaccgggcattaaagaaatgaaagtcgaaactattgcggtgggcaaacatcataatatgcgttgtccgccttatatggggcataaaacgattattattttccattttgaggtcctttcattgatttattgaaagcatggatattttatccaggaagcgccagcaatctgtgaaccagatcaacaaaaaacgatcatttgaaaaataattagtcggcgattatgcatatcgtgctgtgaaataacggattgtttcttaaatgttaattatatgttttttatatcctctataaaatataatatcgccgcgaaaataattattcgcgacgccgaaaataaatgacataaaaattagaagttatttaaaaataatgaatagctattcacggcataaagcgatagccaattccggtttcggtaataaaatggcgtgggcgggtgggatcttgttccagtttctggcgtaaatgtcccatatagatgcgcaaatagtggctatgctccacggcgttaggcccccagacctggtttaataactgccgttgggttaatactttgccggtattattgagtaataccgccagcaggcggaactcaatcggcgtcagatggatttcttcgtcgccacggtggatcaaccgtgcggcgagatcgaccgtcacgccggaaaagcggacgatcggatcggcgcaagggctggcggcgtgccgtcgcagcgcgacacgcaaacgcgcctgcagctcgccaatgccgaatggcttgctcaggtaatcatcagctccggcgtcaagcgcggcaatcttatcgctttcttcgctgcgggcggaaaggacaatcaccggtattgcgctccattgacgcaggtcgcgaataaaatcgattccgtcgccgtccggcaggccgagatcgagaataatcagatcgggctttcgcgtggcggcttccagtaaaccacgttgtaatgtttcagcttcatacacgcgcaggccgtcgccttccagcgcggcgcgcagaaagcggcggatggcctgttcatcttcaacaatcagaacgtttgtcacatatcctcatgaaaatcatcaagttcaggtggctttccttgcggcagcgtcacacggaaacaggcgccgccctgcggtcgattataggcggtaagcgtgccgccgtgtacctctacgatagcatggcaaatcgccagccccagccccacgccggggacggcggactctttgttgccgcgggcgaacttatcgaaaatcttctgttcttgccccgcaggaatacccggcccgttatcccagacatccagttgtaaacgatcgtccttaaccgcagcatcaatgccgatactggcctgcggcccggcgtacttaacggcgttttccagcaagttgatcaggacgcgctcaaataaggggccatcgacatggataagcgttaactgttgcggcagcgacaatgtaatcggatgcaataaacccggctctaacatctgtaacgcgctaccgacgacctcttccagcgtcagccactcttttttaagattaaacccgccggactgaatacgcgccatatccagcaaattattcaccagccgggtggtgttgagaatatgctggcggatttcactggcctgacgcgcgtggggcgatcctgcgctggctaaatccagcgtcaaaatttccgcctggccgaacaataccgtcagcggcgtgcgtaaatcatgcgacagcgccgccagcagagcgttgcgaatactttcgcgctcgctggcgagacgcgcctgttcttcgctggcggtcagcgtcagtcgttccagcgcgttggcgacaagcagagtaaatgtttccagcaggcgttgctgctccggcaccattaactgacgcaaattacccggttcgacgatagccagaccgtacgttttatcggcgcttttcagcggcaggatttgataaggcacgccagggagggtatcggtgcctgcgccggcaggctggcctttatcaaaactccagcgcgcaattgcgtcgtcccacggcgtcatgccttgctggtgggtgagaggcagcaacttaccgttagcatcaggtaacaaaatttggctgcgcgcctggaacgtcgaggcgataaaccgctcgctggtcgcggcgatatcatgttcgctacgcccgacggccagcgctttagacatttcatataaatggcgggtacgctgttcccgataacgggcgacgcgcgcctgatagcgcaccccggcagtaagattgccaatcaccagaccaaccgtcagcatcacggcaaaggtcagcaaatactgcacgtccgaaacggcgagcgtaccgcgtggcgcgataaaaaagagatcgaaactcgccacgttaatcaccgtcgccaccaccgacggccagcgtccgtaaagcagcgcaatcaccactacgcccagcaaatagagcattaccagattggcggcgtcgaaggtgacaagccactgcatagcgataagcgtggtgatggcgcaaagcgccacggcgaccagacagccctgaatctgcccacgccatttctctttaaaaggtcggttatcaggcgtttgcgccaatgcgcgggctggcggctcttccagcgcgacgatcacctgatcgagatccggcgcgcgcctggcaagacggtcggcgaaagcgtcacgtcgccaccagcgtcgcgacgccgggcggcccatgacgattttccccagattatgctcgcgggcatagcgcacgaccgctttctcttcggcgggatcggacagggtggcggtttccgcgccaagctcctgcgccaggcgcagcgcgcttaaaatagcccgccgttgcttttccggtaagcggtgtaacgttggcgtttcgacatagacggcgtgccagacgctgccaagccgggaggccagacgcgccgcggtacgcaccagtttttcgctgccggtgttatgcccgatacacagcaaaatcgcatcgcgggtatgccatactttttcttcgcccggatgcgcgcgccaggcgcgcatctgatcgtccacgcgatcggctgtccggcgtaacgccagctcgcggagggcgatcagattgcccttgcggaaaaaatgttcaatagcgcgttccgcctggccggcgatatacactttaccttcgttgagccgttggcgcagatcgtcgggcggcagatcgaccagtacgacttcatcagcggcatcaaaaaagggatcggggacggtttcgcgcacctgaattcccgtgacgccgctcaccacatcattcagactttccagatgttgtacgttcacggtggtgaaaacgtcgattcccgcttccagcagctcttcaatatcctgccagcgcttaggatggcgtgagccaggcgcgttactgtgcgccagctcatccattaaaatcagcgccggacgccgggcgagggcggcatccaggtcaaattcgcggatttgccgcccccggtgcgagtgacgttttggcggcagaatggtcagcccgtcaagtagtgcggcggtctctttacggccatgcgtctctaccacgccgatcaccacatccagcccctgcgctcgcagccgctgcgcttgcgccagcatcgcccaggtttttccgacacctgcgcaggcgccgaagaaaattttcaacttcccccggtggggcgggggcgtttgttccaacaagcgatccggatcaggacgcaagggttcgtcgttcatttcgctctgtgtccctgtagcgcatccagcgccagattaagctcaacaatattcaccaccggttgcccaagaaagcgcgccagcggcctgtgcgtatattctgcaaccagttgcgcgacctgttcaacgggaagctggcgagccgccgctacgcgggggatttgccatgccgcggcgccgggcgtcagattattatccagcccgcttgccgaggccgtcgccagctcaaccggaaccgcggaactcgcctgggggttagcggcgcgtagcgcggcgacgcgggcctgtatttgcgcatccagttcgggattgctggcggccaggttgcttccgcccgacgccagtggattataaggcgtatcggcggtggcggagggccggccatgaaaatagcccgcggcggtaaacgattgtccgataagcgctgagccgcgtatcacattgtctttatgaatcagcgagccattagcctgccagggaaaccaccactgccccagcgccgtggtcagaagcggatacacgccgccagtcaataacagcagaaataacattgtcgaaaaagcaggacgtaaaccgatcatcatacacctcacgccagacccagcagggtcagcagcacatcaatcactttgataccaataaacggcaccaccagaccacccagaccatagatccataaattacggcgcagcatggccgatgcggaaagcggcttataactcacgccttttaatgccagcgggatcagaaaaataataatcagggcgttaaagatcaccgcgctcagaatggcggagttcggcgaatgcagccccatcacgttgagcgcgtttagctgcggataggtagcggcaaacgcggcgggaataatggcgaaatatttcgctacatcattcgcgatactgaaggtggtgagcgagccgcgcgtcatcagcatctgcttaccgatatgcaccacttcaatcaacttggtcgggttagagtccagatccaccatattaccggcttctttcgccgcctgggtgccggagttcatcgccaccgcgacgtcagcctgcgccagcgccggggcatcgttagtgccgtcgccggtcatggcgaccagccgtccttccgcctgatattgacggatcagcgccagcttggcttccggcgtggcttcggcaagaaaatcgtccacaccggcttcggcggcaatcgctgccgccgtcaggcggttatcgccagtgatcatcaccgttttaatacccatctttcgcagctgggcgaaacgttctttaataccgcctttaacgatatccttgagggcgataacacccagtacgtgcgcgccctccacgaccaccagcggcgtcgcgcccaggcgcgccacgttctcgacgttttgctcgacatcggcgggaaaatggccgccattgctctcgacatgacgccgaatcgcgtccaccgagcctttacggatcatccggttatcgatattaatcccgctcatgcggctttgtgcggtaaacggaacaaaggtggcatgaagcgactgcacatcgcgttcacgcaggttaaagcgctgtttggcgaggatcacaatgctgcgaccttccggcgtttcgtcggccagcgaagcgagctgcgcggcgtcagccagcgtgcgttcgtccacccctcgggcgggaataaaatcggacgcctggcggttgccgagcgtgatagtgccggttttatccagcagcagcacgtcgacatcgcccgcggcttctacggcgcggccgctggtggcgatgacgttcgcgcccaacattcggctcattccggctacgccaatggcggagagtagcccgccgatggtggtggggatcaggcacaccagcaacgccaccaacacggtgacgctgaccgcgttaccgccccaggcggagaagggccacagggtggcggtcgccaataaaaagacaatggtcagggcgatgagcaaaatcgtcagggcaatctcgttaggcgttttccgccgctgcgcgccttccaccatcgcgatcatccggtcaagaaaggtttcgccaggattgacgctacaggcaatcaccagccagtcggaaagaattcgcgtgccgccggtgacagaggcgaaatcgccgccggactcgcggatcacgggcgcggattcgccggtaatcgcactttcatccaccgaggcgccgccttcgatgacctcgccgtcgcagggaataatatcgcccgctttgaccaggacaatgtcgcctttccgcagttcagcggcgggcacgttatcggcctgcgcatcatggcgaggggcgcgcaggcggcgagcgaacgcggtctttttcacccctttcagactgtttgcctgggctttgctgcggccttccgccagcgcttcggcaaaattggcgaacagtacggtgaaccataaccacaggctgataatccctgtaaacaaggcgcttcccgctatttgtcctgttaccatagcgagcgttaacagagtggttagcacgctgccggcccagaccacaaacatcaccgggttacgccactgggcgcgtgggcttaatttttttacggcatccgttagcgcctgtacgagtaaaacaggttcaaacagcgccagttgcttgcgactcatatcaatgtactccacatcgctcaaggtaaagagaaatgctccgctaccgggccaagcgccagggcaggaataaatgtcagcgcgccgaccagcagtaccgtgccgatgagcagtccaataaatagcgcgccgtgggtcgccagcgttccctgactggccggctgtacttttttactgaccagcgagccggcgatggccatgacaggaataatcacgccgaaacgtccgacgaacatgcagaatgccagcaaacagttccagaaaggcgagttagcgctcagacccgcaaaggcgctaccgttgttgttggcggcagaggagacggcatatagcacttcgctaaaaccgtgcgggccagggttcagcattgcgctgcgtccggcatccgtcatcatcgccagcgccgaacccaacaagaccagcatcggcgtgaccagaatcgccagcgcggtcattttcatttcgcgcacgtcgatttttttccccagatattccggcgtgcgaccgatcatcagccccgcgataaacaccgccagcaggacaaacagcaacatgccatacaggcctgaaccgacgccgccaaagaccacttcgccaatttgcatcagccacatcggcaccataccgcccagagcggtaaacgagtcgtgcatggcatttaccgccccgcaggacgccgcggtcgtgacgacggcaaacaggctgctggccagcacgccaaagcgtgtttctttaccctccatgttgacgctactgtccgcgcctgccgccaacagatgtggatttccctgaacttccgcccacatcactaccgctacgcagaccacaaaaatgaatgacattgcccacagtagcgcgcgtccctgacggcgatcgcccgccgcttcgccaaaggcgaaacagagcgcggctggaatcaaaaatatcgccagcatctgcgccagattagtgagcgcggtggggttttcgaacggatgcgaagagttggcgttaaagaaaccgccgccgttggtgccaagcattttgatcgcctcctgcgaagcaaccggccccatcggcaagagttgtttagcgccttcaagggtggtgatgggctgataagccgacaggttttgcggtacgccttgttggataaaaaacagcgcgataattaacgcgacaggaaataatatccatagcgtaatgcgtaccagatcctgccaggcattacccagcgtgtgcacattctggcgcgtaaaggcgcggataagcgcaaaaaccaccgcaatcccggtcgccgccgacaggaaattttgcaccgtcagcccggccatctggctaaagtagctcagcgtgctttcgccgctgtaggcttgccagttggtattggtgacaaagctgacggcggtattcagcgccagatccccggacagccccggtagccgctgcggatttaagggcagccactcctgccagaacaacaggcaaaacaggatgcccagtcccagcagattgagcgtcagtagcgccagtaaatactgacgccagttcatttcgtggtcggtaatgccaagagtccgccagaggatacgctcaatgccagccacgcccggcaacggaacggcggcgatgagccttgccaggcccgaacccaatggtttcgccagtaccaataaaatcagtaaaaaactggcgatcagtaaaaatccttgcgcggccatcagaacgcctccgcattaatcagggcatagaccagataacctaaaagtaagaaaaccagcacgatgccggttatcacgcctgcactcacagagcacctccagtggcattgttttactcctgagaaaggtaattttttggctgcaaagatttcgcaaaaattggcgggcggagtgtaaaaaaagtataaaaatggcaaagaccattatttaactaatgattagtattaatttaacctttttgtaactaatttacgctttgaatgtaaatctgctggaaaagcgtgaaaataagtggtcggatgagtagtaaaattacaccgaaagcggtactattttaatcaggtaacgaggttcaatttttcggtgctattcaccgattcaatctataccggggcgggtagcgtcggtataaaggggggaaacgtatggaacactataaagactatccagcgcatgtcatttttgtccgtcgtgctttcgcggtgatcgcaggcgtgctggcgctgccggtgatgctcttctggaaagaccgcgcgcgtttttatagttatctgcaccgtgtctggtcgaaaaccagtgataaaccggtatggatggcgcaggctgaaaaagccacctgcgacttttattaatcgcgaccagcctgaaaaaccgtcagccgccacgctggcggtttttttatgcgccagggtctacactgtttaacgctattcgccgtgacgtttcatctttcaggagttgtatgcccacccatttagtctggttcaggcgcgatctgcgtttacaggataaccttgcgctggccgccgcctgccgcgatgcatccgcgcgggtgctggcgctttatatttccacccccgcgcagtggcaggcccatgatatggcgccgcggcaggcggcattcatcagcgcgcagctcaatgcgctacagacggcccttgcagagaaaggcattccgttgctgtttcatgaagtggcggattttaacgccagtattgaaacggtcaaaaacgtttgccgacagcatgacgtcagccatctgttttataactatcagtatgagtttaacgagcgtcagcgtgatgcggcggtggaaaaaacgctgccctctgtcatctgcgaaggctttgacgatagcgtgattctggcgcccggcgcggtgatgaccggcaatcatgaaatgtataaagtttttacgccgtttaaaaatgcctggttgaaacggctaaaagaagatatcccgccgtgcgttccggccccgaagatccgggtgagcggcgcgctttctacacccttaacgccagtctcgcttaactacccgcaacaggcgtttgacgccgcgcttttcccggtggaagaaaacgcggtcatcgcgcagctacgtcagttttgcgcgcagggcgcagacgagtatgcgttacggcgcgatttccctgcggttgacggcaccagtcggctttccgccagcctggcgacgggcggcctgtcgccgcgacagtgcctgcaccgattactggcggagcagccgcaggcgctggacggcgggccgggaagcgtctggttgaatgagctcatctggcgggaattttaccgtcatttaatgacctggtatccggcattatgcaaacaccagccgtttatccgctggacaaaacgcgtcgcgtggcaggaaaacccgcactattttcaggcatggcagaaaggcgaaaccggttatcccattgtcgatgcggcgatgcgccagcttaacgcgacgggctggatgcataaccgtttacgcatgattaccgccagctttctggtaaaagatctgttgattgactggcggttgggggagcgctatttcatgtcgcagcttattgacggcgatcttgccgccaataatggcggctggcagtgggccgcctcaaccggtactgacgccgcgccttattttcgtatttttaatcccacgactcagggagagaggttcgatcgcgacggcgaatttatccgccagtggctaccggcattacgcgatatccctggaaaagcgattcacgagccgtggcggtgggcggaaaaagcgggagtcgtgcttgattatcctcggcctattgtggagcacaaacaggcgagaatcgcaacgctttccgcctatgaggcggcgagaaaaggggcgtgatacaggcccggtagcgcaaactaccgggcattctgctatcaggattcgacggccagcgcgcggcttttgaatttgaaggactgatacagccaaatcagcaggacaacccctacgcaggctaacgcgccccaggtgatctgttcaaaaacatccacataggcgttgatggcgtaattaaccgcgccgctggcgtcgaaggcgctttgcgaggtctggtcagcgatgacgcctgccagatagttagctatcgcgccggacagcagcatataaattccggttaatacgccggtgacgccggggatatcaatgcgcgtaatttgcgacatggcgaccgggtcgataaatagctcggcaaagcccatcaccgccagtcccagcaccattagcggcattgaagagtgtccgtaagcggcggaccagcgtgcgctcagggtcagaatacagaatccggcgctcatcagaccgagacccagcgcgaatttgccccagatacgcacggtgcgattaccgcttacgctctctttaaccagccaggccaggacgaccccacacagcatcacggcaaaggcgttcaccgactggaacatggcggtaggaacggaatagcccagaatatcgcggttcacaaagcggtcgatatacaggctgatagaactgccgccctgctgggcaaacgcccagaacagcatactgaacagggtcagggtgacaatcagccccagttctttgcgctgtttggccgtttgcgcctggcgataaatttttgccagcacgaccaggccgatcgcggtcgccacgattaaggcatagacagaccattctttccagaacagaacggtaatcagcaacggcgccgctaccagcaaaattaacagccagccccagttcggcagcaggtagtttctggcgcacaacacggctttattcacgccggtggtgtgggtgaaatgacgatttccacacaggaagatcactaaccccgcaagcataccaatggcggcgagcgcaaagcccatcgcccaactgtactcctcttgcacatagccgcaggcgataggcgccacgatcgaaccaatattgcccgctgcgtaaagcagcgagaacccgccgtcgcggcgcggatcttccggctggtacagttcgcccagcaggcagctaatattcgatttaaacaggccgtagccgcagacaatgatcgccagcgacagataaaggaatgtcggcgcgatctcactggcgcccagcactaaatgacctatagccattaaaaatgcgcccagcatgactgccattcggttgccaagcaccttatccgccagatagccgccaagaatcggcgttacgtagaccagcgaacaataagcgctgaataactcataggcgtggttatcgtcgtattttagctgattggtgagataaagaatcagtagggcgcgcataccataaaagctgaagtactcccaaatttgcagggcgacaacgtagtaaatagcgcggggttgagatgcttgtttattcatcgtatttccgggatagaggcactgcggcaagaacgcggcattctcagataatgcctttctttgtgggcttattaagcctgccgtatcgccgtgtttccttaaagttaccaacatgatacagaactgattttttctgcaatatgcgttctgattgcataaatatacatgaaaccgatcgtgttttgctaagtaatttgcgccaaacccggaggtgattgtttcttgatgtgtcaaacaaatgtttatcgacgaacggctaacggaaggctatgttaacggagactgaacccgtaacgggaaagtagaacgtgggttaaagggagcgatgatgaaaaacaccgagctggaacaactgattaacgacaagctgaacagtgcggcaataagcgattatgcgccgaatggtttacaggtcgaaggaaaagagacggtacagaaaatcgttaccggcgtgaccgcaagtcaggcgctgctcgatgaggcggtgcgtttgcaggccgatgcggtcattgttcatcatggttacttctggaaaggcgagtctccggttattcgcggcatgaaacgccgtcgcttaaaaacgttactggcaaatgatattaacctttacggttggcatctgccgctggatgcgcaccctgagctgggcaacaatgcgcagttggcggcgctattgggcattaccgtgaaaggagaaattgagccgctggtgccgtggggagagctctcaatgccggtgccagggctggaactggcctcatggattgaagcgcgtctggggcgtaaaccgctatggtgcggcgataccgggccagagaatgtgcagcgtgtcgcctggtgtaccggcggcgggcaaagttttattgatagcgccgcccgcttcggcgtggatgctttcattaccggcgaggtgtctgaacagaccattcattccgcgcgcgaacaggggctgcatttttatgccgccgggcaccatgccactgaacgcggcggtattcgcgccctgagcgaatggttgaacgaaaacacggcgttggatgtgacgtttattgatatccctaacccggcataactgagaggcaataaagtgcagcgagcgcgttgttatctgttaggcgaaacggcggtcgtcctggaacttgaaccgccgattacgctggcgagccagaaacgcatctggcgtctgacgcagcgtctggtcgatatgccgaacgtggtggaagccattcccgggatgaacaatatcaccgtgatcttgcgggaaccgcaaaccctggcgctggatgcgattgagcgtctgcagcgctggtgggaagagagcgaggcgctggaaccggactcgcgttcggttgagatcccggtgatctatggcggcgcaggcgggccggatctggcggcggtggcacggcacagcggtttgagtgaaaagcaggtcgtggagctacatgcctccgttgagtatgtcgtctggtttttaggctttcagcctggctttccctatcttgggaatttaccagaaccgctccatatgcccagacgcgcggagccgcgcctgcaggttccggccggttctgtcggcatcggcggcgcgcagacggggatttatccattatccacgccgggcggctggcagctgatcggcctcacgccgttgaagttattcgatccgatgcgggagaccccggttctgctacgccctggcgatagcgtacgctttgtgccgcaaaaggagggaatatgctgaatattattcgcgcggggatttatacctccgtgcaggatagcgggcgtcacggctttcgtcagtcggggctgagtcactgcggtgcgctggataaacccgcctttcagaccgctaatctcctggtcgggaacgatgcgaatgccccggcgctggaaatcactctcggtcaactggttgtcgaatttgaaaatgagacctggttcgctcttaccggcgcaggctgcgaggcgcagttggatgatcaaccggtctggaccggctggcgattgccggtaaaagcgggtcagcgtcttacgctgcatcgtccgcttcacgggatgcgtagctatctggcggtggcgggcggtattgctgtgccggaggtgatgggatcgtatagtaccgatctgaagtccggcatcggtgggctggaaggacggctgctaaaagatggcgatcggctggcgacgggtaaaccatcgcgacagtttagcgggccgcagggcgtgaagcagttactgtgggggaatcgcatccgtgcgctaccggggccggaataccgtgagttcgatcgcgcctcgcaagaagcgttctggcgttcgccgtggcagctcagtccgcaaagtaatcgcatgggctatcgtttgcagggacaatcgttaacgcggacaacggatcgcgaactgctgtcgcacggtttgctgcccggtgtcgtgcaggtgccttacaacggccaacctattgtgttaatgaatgatgcccagacaactggcggctatccgcgcattgcctgcatcatcgaggcagatatgtaccatctggcgcagatccctctaggacaaccgatccattttgtgcaatgttcgctggaggaggcgctcaacgcgcgccgcgagcgtcagcgctatctggaacagcttacctggcgacttcagcatgaacattgatttaaatgcggatttgggcgaaggttgcgccagcgacagcgaattattaacgctggtctcctccgccaatatcgcctgtggttttcacgccggtgatgcgcaaaccatgctgacctgcgtgcgcgaggcgctgaaaaacggcgtggcgatcggcgcgcatcccagctttccggatcgggataattttgggcggacggcgatggttttgccgccggaaacggtatacgcccagacgctgtaccaaatcggcgcgctgggggcgattgtccaggcgcaaggcggcgtgatgcgccatgtcaaaccgcacggtatgctctataaccaggcggcgaaagatcctcatctggcacaggcgattgcgaaagcggtacacgactatgatccgtcactgatactggttggactggcgggaagtgagctgatccgggccggtgagcgccatcgcctggtgacgcggcaggaggtgtttgccgatcgcggctatcaggccgacggtagcctggtgccgcgcatgcaacctggcgcgctgattcacgacgaagagcaggcgctggcgcaaacgctggatatggtacaagccgggagagtgaaaagcgttactggcgtgtggacgactgtcacggcgcaaacggtgtgcattcatggcgacggcgagtatgcgcttgcattcgctcgcaggttacgcgccgcgttcaatgcgcgtaatatacacgttattgcctgagagcccgacgattgaagctattatattacggctgctaaaaattatcgtgttctgttctcttaatgtcaggaagagggatttattcaatactatataaatccccttataatatattattttaaaaataaccaagtgatgctgtaatagccagtatgatgagcttattgctgttagcagcagagtttttgaaaatcattatgatattgttagctatcgccatctaatcaaacctccggggcgggtaaactacctgactctttattacccctttctgattgatttacctcacgatagcctcatttttagcatttatattcctcatcatgacgacttatcaggagattgaagccagattgattcgctgtttcactatcacgtcatggatagcgtgccagattgccagctatatggattttaagctgtttacgcatagcaacttttttagcgaaaattaaactcatctgatcagtgattttttagtatattactcattttgttatgatggatttgttttgtgaaaagaaaatatcttacgcaagaagagattgaaaaactgctgtcagcgaccgacagaatgcccttcccggaaagaaaccgctgcttaatcctgatggcgtttattcacggcttccgggccagtgagctgctggggctgcgcttgtcggatattgatcttgcaggaagacagctttatatccggcgcctcaaaaatggcttttcaacgtgtcaccccctccttcccgatgagtataacgtactgaaaagctggctcagggccaggaagtatcttgagaaaggggctgacggagactggctgttcctgtcgctacgacggcatccgctcagcaggcaacaatttttttacatacttcgtgaggcagggcggttggccgaattaacgatagcgccacatcctcatatgctgcgacatgcctgcggctacgcccttgctgataaagggattgatacacgactcatacaggactatctggggcacaggaatatccagcacaccgtaagatacaccgcaagtaacgccgggcgttttcatggaatatggcgaaaaaaacgtcgagtataaccgtacgttctgattcaaaaagttaagtccgcttcgcgctttcatcatcctctcagatttaccccttccacacaagagtcatacaatcgtaatctattgcttattaaggagttatccatataacaataaaaaaactaagggaaaatttacctggtccaaccagcactatgctgtatccatttttgtcctgcctgcacaaaatgttaattttaagtgttaaaaaaacgtattaaataatacttaatgctgattaattatcatatcaaagaattaaatcctttattttaccttttgaatcatattgttaaatcacagagaagtctgttcagggaaagctgatttacataatcaacatataaatcaatagattactgtgttttctatttgtcattttgtactccgcacagggcagaattaccctgcggcaggagcatgtactaccagggggactgacggcctgtgcagccgaaaagcagaaccggacagggtgtcagagagcagtgtttagatagggccagacgtcatttttcatacagacatggaatggctcccggtccacgaaagggtgcggacatgttgtttccacaacacgaagctgccgttgctggcgcagtgccgggtcggcaatggccagaggagaacaatctgatgacgcaagaatatgcggaaatgtccaccggaaggggggggaccagtaagtgccggtacagtatgggggcgaaaatatttttgctcctgctggcggtctccaccgtcgcagcgttgttcagcctgtaccaggttctgacgtactgatatgcagacgttaaccagagtactgccgcctctccggctgattatgttttgtcagtcaggcgaaaatcctacgcagtttccggataccggcggcctttgcgtggaggactgcgttcgtctcaggacaccagaagggctgctggatcggttgcgtcggtggcccggcgcgatggtgatatccgccggacggccatcaacccagcttctgctgtggcaacaggtttttctgcgttatccgcggacagtggttttttgcagcagtaacgcgtttttaccggttgacgtcagcgtggaaggttacttccgccatctgaggctgattaaacgcgccatgtcggtaagggttctggccagaatggctgagcttgccatatggtcatcactacagacatcgccttacgaggaggagatgaaaagcgcgttgagcgtgccggagctggtgatggagataaacagccgcacgctggtcaggttactgtcagagcgtctgccaaaacagggacggcgggtgctgggattactgttgtcaggctgtagcccggaaatgacggcccgtatgctgggaaccggcgtgaggcaggtctggctcgcggagcagacgctgaaacaacgctgggatatcccgacaggagtaccgctatctgatgcggtaagaataaggataccggacgtcggtccggacattagccaacagagtgggttggtaaaaactggggccggtaacgcaccggatttatgctgacagcatatttacatcatgccgcgcggtattcagacccataatgttgcgttctgaatgagttatcttcacaaaataaatatggcaatcatcgttgtccggaaataccgcataacatgtgacattaatgaatctgtaatcagtgcgagggtttacgcgctgtggcggtagcgtggaattatctggatgcgttgagtaaatttcactttacccttctgatataaatgaaaatggttctggataaactatctaatattatctgtgtctgcaaacagagtgacaaaaataatgcaacgtaaaaagatactaattgtaggtgcgggcctttcaggcgcagtaatagcacgccagttagccgagcagggacatgtagtcaatattattgatcaacgttcacatatcggtggtaacgcttatgatgcccgagatgagcacacgggtattatggtgcacgtttatggtcctcatatttttcatactgataatgaaactgtatggaattatgtaaataaatacgctgagatgatgccttatatcaataaggttaaggccacagtaaatggtcaggtattttctctacctatcaatcttcataccatcaatcaattttttggtgtcgcctgctcacctgatgacgccaggaaattactgcttcaaaaatgtgatagcaccattctggaaccacaaaattttgagcaacaggccttgcgtttcattggtaaagagttatatgaagccttttttaaaggttataccattaaacaatgggggcttcatccttccgcgttacccgcttctgtattgaaacgtatccctgttcgttttaattatgatgataactatttcaatcataagtttcagggaataccaaaatttggttatacacaaatggtcaagtccattgtcgaacacgaaaatatcgctgttgaactatgtcgctccttcactcaggaaatgcggacaaattatgatcatgtttttttcagtggcgcgctggatgccttttactcctgtcaatatggccgactggaatatcgtacattagactttaaaaaaataatttgccagagtgattatcaaggatgcgcagtaatgaattattgttcaatagatactccttatactcggattactgagcacaaatatttttctccgtgggagagacatgaagcttcaatatgttatcaagaatatagtcgggaatgtgaagctggtgatataccctactatcctgttcgcagggcagataaaatggatttactgaataaatatctgtcgcgggctaaaaaagaaaaaaatattactttcattggtcgtcttggcacttatcgttatctcgatatggacatcacgatagctgaagcattacagacggcggacgtatacttaacgtcgctatatgaacaaaaagaaatgccagcttttacagttaccgtttgatgaagtgtacagcgctaatcgtaacttttaaccgtcttgaaaaattaaaaaaaagtgtgcgagagactgttaaggcgggtttttcctctattgttatcgttaataatggctcaagcgacggtaccagggaatggctttcttcattaagtgaacctggcatcacgatacttaatcttaaagataatcttggtggtgctggcggatttaaagtaggtagtcaatatatatgctcatatagtaatgccgattgggtatttttctatgatgatgatgcttacccggaaattaatattttaaagcatttctcgttattagatacctcaagataccgtatatttgcgtcgcgagttcaggacacctatgggcggtcttgtcggatgaatttgcctttcattagggtcccatctacggtgtttgagactatttattatgcgatgcgcccagagaggttttctccagtaagaactcaggttactgatgttcaaactgtgtcattcgttggtatgattattgatcgaaaggtattgaataaccatcttaacgatatccatgatgaacttttcctttattatgatgattttttctttggttataagctagtattgtccgggcagaaaattcgttactccccagaaattaaatttattcatgatatctctattcatggaaagtgtatctgccccgaatggaaagtatattatctttgtagaaatttgttgctgctgagaaaacttttacccgttcccaggatattcagtgttctttctatagtgttacgcctctctaaatatctcgccatattaccatggcagcgtaagaaatttcgttatctatattttatctggcagggaatacttcatggacttaaaggtattagtgggaaatatcattagcaggacgaagagatgaaaaggttatgttattttgtaaattcagactggtactttgatttacattggacagaacgtgcgatagcggcaagggatgcgggttatgaaattcatatcataagtcattttattggtgaagagattataaaaaaattcaaaacgcttggttttatttgtcacaatgtgtctcttgttgctcagtcatttaatatgtttgttttttttagagcattccttaacgctcggaaaattattaaagagattaatcctgacttattgcattgtattacgctcaaaccttgcctgattggtggggttagcgccaggagaagtaatagtccagttgttatcagctttgtcggacttggtcgaatctttttatataataccgtgccaatgagaatattgcgtgcgttaaccgttttggtttacaaatatattgccggtaataagcgtggtgtttttatttttgaacatgataaagatcgacgaaaaatatcgcgtttagtaggtattgattatcataaaactatcgttatcgaaggtgctggaattaacccggatatttataaattctctatagagaaaaaacatgagataccgatagtcctttttgcaagccgaatgttatggagtaaaggtcttggcgatctcattgaagcaaaaaagatcctcagacaaaaaaatattcattttgttttaaatgttgcaggtatattggccgaggacgataaagatgctatccctttggagctcattcatcactggcataatgaaggactaattaactggctgggacgctcttcgaatgtatatgagcttattcagaaatcgaatatcgttgcattaccatctatttatccggaaggagtaccacggcttttattagaggcatcatctgtaggacgtgcatgtattgcttatgataccggcggatgtgatagcttaattattcataactataatgggttgatcgtgaaaagtaattcagctcaggagttagcggtagaattagagtatttgttaaaaaatccacagattcgcttagagatgggggcgaatggaagaaaacgtgtaaaggaattgttttccagcatattagtcattaataagacattgcaaatttataaagacactattggttgctaacaccataaagtgcttatgaagtaggtcagtgtttagataaatagtatgtaaatattatagaaaataaataagttatattttcatatcgttaaagaataagttcttcaggtaaaggtgacacggaaacaatgaatgatttgaaagaagctctggccaggcaccaactttggatttcgctaggttggaatgatgtcctgggacgataccggcgatcggtgttagggcctttttggataacgatttcgatgggggtcaccatatcagcgatgggacctctttacggttcgctgttcagttctggttccgaaaattttatcatgcatcttactttaggtatgatcttttgggcctttctatcagcaactattaatgagtcatgcggaatatttaatgagtccgcatcaattattaaacaatctgaccttccgctatatttatatatattacgtgttttctatcggcagtttatgattatgttgcataattttatcattatacctttcgtgattttttttaccaatacatcggtaaatcttgatattctcctttttatacctgcaattgtaataacatccatctcattaatttctacaggtatgattctcgccattttttgcacaagatatcgtgatatgggaccggttgttcaaagtgtggtaacgttgtgtttttttataactcccatcatttggacatcggaacaattaccaaagggaagaaaggagtttgttgattataatattttttattactttatggagatgctcaggaaaccattaatgggaactgtaccagatgtaactatatggttttacacaataataacctctattattatgttgatggtctcaaccttagtgttgactaaatatcgctcaagaatcgtatactggttataattaatgaaaatctcttgcaaaaacgttggcgtaatactccctatatttaactccagccaccgttcatttaaaaaaacttttctacaggctgcttcaggtggacgaattggctcatcgaataccgggattattgaagtagaggcattaaaaaaaattgattttacgcttaccgaaggtaaccgtcttgcgcttatcggacacaatggttcgggcaaaacaactcttctgagagtacttgcaggggcctataaaccaacttcagggaagtatgaatgtattggtcgagtcaccagcctcattgatcccatgatgggaatggatggtgagcttaccggcctggaaaatataaaactgaggggactatttctcggtctgtcaaaaaatgaaataaaaaatattacagaagatgtcatcgagttcagcgagttaggtgattttattaaaatccccgttagaacgtattctagtggtatggttctgaggcttggtttttctatttctactgcaattaatcctgaaattttactgatggatgaatggatgagcgtgggtgatagtgattttaaaagaaaagcagagatgagattaaatagctttatctctaaagcgggcattatggtaatggccactcacgatgatgaactggctaaatctgtatgtaataagttcatcaggcttgagcacggtgagatagttagcaaaggcggattttaatattcttattgcagtatttatatcactacgcggtgagaaatttactattttataatagcgttaccccagataatataaatttataggttcgttatgtattttttacttcaaaaagtaattttaccaaacattgatctatgcacggaagagcagctttatttcagaactcagggcgggaagtataactatacctcacgtaacttacttgttccgcgtcataaggttgcatattttgatactttttttaatgcattctcaattaagaaatggaaaaaatatacaaccttaacatcactttttttgcgggttaatataattggtcgcggaactataactgtaaggcataaagagaatggtgtcattagagtattaaagcaaattgattttaaatcgtcatgtaatattagtgatgagattgagattgatatatcaaaaataaattttggatatatctatgtggagtggcaatcagacgaagactctgttttaaatggatttgaattgctgactaaagatcatgttagtaaatcatctatggctttagttataacaacttataatagaaaagaagctgttactaaaacaatcaatagaattaataaaacactcttaacccagagcgaatttaaagatcgttttaaattgattgtcgttaataatggcgaggcgattaatcacccgtcaggaaacggcattatagttatcaataatgaaaacctcggtgggtcaggcgggtttatgagaggtttgatagaggcagggaaaatcaacgatgtcaaacatgtcatatttatggatgacgacggctcatgtgaaattgaatcgatttgtcgaactcatgcttttttactgatggctaaagacaaaaatacagttgttactggctgtatgctttttgaagataacccggcaatcatacatgaatctggtgccatatggcatagagattttttacattacccggataaacattatctggatgctcgggaaatagattctttagatacttttgataatgaaagaaaaataggctacggtggatggtggttttttgcctttaatattaacgctattgaatattactcatttcctttctttgttcgtggtgatgacctgctatttggatatatgcataaaaaacataatattgtcacacttaatggtgtggcttcgtggcaaatggattttgaaagaaaaatatcggttctaaatagctatttgaacttcaggactgttgctgtacctgcattaattagtaaaagaaagtttgctgcactactgttaagtgttttctttgtgcgggaagtctttcttgcgagtttttcatgccgctatgaacttgccagagcaatgattatgtcatataacgattgtctttctggacgggagttttgggaagataatgtagatcttctggagataagaaaaagaattaatgcaataactcataatgaaaaattcaatgtagaaggtattgatattgttaatggttgtgttgattacccatgttctggtaaagaaaaagccatctacaaattttttagatgcataacccttaatggacacttaattccagctttctttttaattaaaaaaccaatcgtggttgattatcgtcattatcaccctactaagttttcattccggagaattactatctatcatttaaatatagaaaatggcaaattattaaaacttacccactcaaaaatggagttttttaaagttattattaatggtttgtttacggcagtcaaaaatttttatcggtttaaatctgcaaaaaaagagatgaaaaatagtttgccctatcttacctcaaagctcttttggtataaaaaattcaataaaaaatctgaagataaatattaaacatgatgtaagtggtgttgatgagaattataccgattttttaattatatgactatgataatcttaggtatggttctgttgctacaccttatctggtgtcagtctaataaaatattataatccttacccaatgtcagcatttattcatagggtgttaatttttatatataccgtaaaacgcgaaatcagaatatggaaaagagtcttttagttattgtccgacataaacctgggcgtactcgtctattaatgcgggccttgcaatccattaatgaccagacgttcaaaaaaataaatatcatcattttctgcatggaggaagaattgaaatgtcacaatgtggatgatttttatctgaaagaactgtcaaatatatatagtgttatctacgacgaaagctgtatctttaatgctattaagatgtctgaatctaattatttatgctttatgggtgatgacgattcttgggcccctgaatatgtgtcaaggctactcagtgttttggcgaatatacagtcaacgtattcatctgtaaatgcaatagcatgccatacaaataaagttgctgagattgcggaaaataatagaataattataaattcaacgcaaccatggaaccactatttaaatgctggccctgttagttttgatgttatttattacaggaattctattccactttcctcgtgtttattcgataaaaattctgttatcgatatgattgaaagtcataaattatcctctcctgcatttttctggcctttttttattcattaccttgcagaaaatgatgtttggatcttacctgaagcactggcattttatcatttcagagaaaatgatgactttgaatttggcaattataccgtaattaacaatgagttatttgatatagaatgcaaaattgcagaaaataaaatgatgagaagtattgatgactcatcattgctcaatgtgttactttcaaatattgctaacaatagtctttttcataaaatttcttatattgaaaataagattaaataaaatatggatatgaactttaaaaaatacaagaccgtaagctttgatatctttgatacattggttagccggaggatttaccgtcccagagatttgttttcattaatgcaatcaactttagcaactgagaaattttttatatcagcgtacgagattggtattattgataatttcccagagataagagttcaggcggaagtaagtgccagagagaatagggtcaggcgttttggcggcgagccggaaatacttatatctgaaatatacgatgaaattttaaaaaagcatccgcagctttcaccagcgacagtaaaaaagataatcgatctggaaatacaaatggagaagattgttttatataaaaatgcgcgtggaagctgtttgtttgaaaaggctattagtgatggttgcaaagtcattttaattagtgacatgtaccttccatcagcaatattaaaggagttgttaacatcatgtggctatgatatcagtaacattccagtttattcatctggcgaagagcggtactctaaaaatagtggtaaattattttcaatagtcaagaaaaatgaaaatgtagatattgcatcgtggatgcatgttggcgacaatgttcatgctgatattctgaatgctaaaaaactcggcataaatactctccatgctgattggtcagagtataatcatgggatatctaatcattggaaagctaaagatattattggtgaatctatttgtaagactttattacttaaacaagtttctgctttccatcaaaatgatcctttaaacgagataggatttaaagtatttggtccattattattaggttatgtatcctggttagcgaatcagttaaagattcataaaattgataaagcgctttttttagcacgcgatgctcacttaatctataaaatttataatgaatacttttcagaagaacatgtaaaatgtgaatatttatatatatcccgcgcatcagcttatatggtggggatgactgattggccgatgcacaggatttggcatctttttggtggtaagaataagaaaagtattaaaaagatacttgctatcgcggggttagatgcgagtgagcatatttcagatatacatcatgttggttttcctgacgaggagtatattcctgtttcaggagaggaacataaggttcactggcttataaataaattatttccatatattttattaaaaaatactcagcacagggaagtttacgctgattactttaaaacggcctgtgaaggttataaaaatatagcacttatcgatgtaggatggatgggtaatattcaatcagtatttgctcgttctttaggtgcgcaatgggcagaaaaacaaatacatgggttttatttggcaacttttgctggcgccaatgataaccgatctatttataataagatgtttggttggctaaccaactatggccatcccaacgataagtgtgatcttttcttatcaggaggggtggaaataatggagttcgctatggctgacaatactgggtcaacaattggctataaaaaaacggataatggaataattcctgtacgtgaagatagcagtggttctgaaattgagtatttaaaaaaagcagcaagattgcaatcagggattatttctttttttgagtacgtcaaaccgctcatacaaaaaggaaattatgcagcacttagtagtgttgtattgtcagaacctttttttgaattgatagccagaccctcaagcgctcaactggacgccttatcttccctcacacattcagagtccgcgggatctaacgcagaaagaatcgtgctagccaagaaactgcctttaaaggataaactttttcccggagaaaattatatcaaagagttgaatgccagttattggaaagaaggctttaaaaggatcaacagaaaaaaattttgggcaaaatataactaagcgtcatttaattccggtaggcagacaatcattattgggcgctcgcccgacaagggctgagtcgattatgccctggcgcgatcatgttaaccctgacggggaagtggtctcgtgctgcgataatgttattatcactggataccaccgcctgtttgtccatccgctgtggatgttcattatggtgttcgatgtgcattccagatagtcagaggcggtgtagtccattaatcaactgttaacaaaggatattatcatgcctgaaggcccggaaattcgtcgtgcggcggataatctggaggcggcaatcaaaggcaaacccttaaccgatgtctggtttgcctttgcacagttaaaaccgtatgaatcgcagcttaccggtcaacttgttacccggatagagacgcggggaaaagcgttattgacccacttttcaaatggcctgacgctctacagccacaaccaactctatggcgtatggcgggtgatcgatactggtgaaataccgcagaccacgcgtatattgcgcgtcaggctacaaacggcggataaaactattctgctttatagcgcgtctgatatcgaaatgctgacagcagagcagctcacgacgcacccctttttacagcgagtcggtccggatgtgctggacgcgcgtctcactccggaagaggttaaagctcgattgctgtcgccgcgttttcgcaaccgacaattttccgggctgttgctggatcagtcctttctggcgggactggggaattatctgcgcgttgaaatcctctggcaggtaggattaaccggacagcataaagcgaaagatctcaacgaggcgcaactgaatgcgctttctcacgcgctgttggatattccgcgcctttcctacactactcgcggtcaggcggatgagaacaagcatcatggcgcactgtttcgctttaagcttttccaccgtgacggcgaagcgtgtgagcggtgcggcggcattattgaaaagacaacactgtcctcacgcccgttttactggtgcccgcattgccagaaatagccggaaccgacatcggcgagcggctattgcctgatggcgcgacgcttatcagccctacaaaggttgtttgggcgcataggttgatataaaacgggccactgctggcccagttaacagaatgctgaacagccgtagggtttgcattgccatgatgagcgccatatcggcactgcttcctgccgcgatcgcggcaaccgtatccagaccaccgggactggtggcaagataagccgtcataaaatcaatctgcatgtagtaagccattccccacgccatcgcggcgcaaatcgccatcagcgcgaaaattgacaataagatttgcggcaatggccgcagcgccataaaaaacacctgtctgtcaaaacccagcccaatacgccagcctatcgccatatacgccacggccagcagccattcgggtaattcaatctcaatgatgccttgcgaatggagaagcgcgcctgccaacatggggagcagcatcgtgccggaagggatacgcatcaggcgaccggcaatgcccgccacgatcgctaataacagcgtcgtcaatacattaccgctaagcggcggaaaccagatcacctgttggctgaccgctgccgcgctgtcgccgagtatcaggcgtgtcaccagcaccgccgcgccagccacaaacagtacccgtagatactgcataaacgccaccaggcggatatccgccccgtaatcttgcgccatcgctaccattgccgccgcgccgcccggcgaagacccccatgcgccggtgttgccgggcagtgagctgtaacgtaccagcagccagccgactaccgcgctggaaagcagcgtcaccagcaacactaaaagcacgaccggccagtagagggcgagggtggtcaatatcgaaccggttagattttgggcgatcatacagccgagaattgcctgcgcggcgagaaaaataccgcgcggaagttgtagcgtactacctcgcaaactcaacacgatacccgcaatcattggaccgagcagcattgccgccggaaggtgcagatagagaaaaataagggaaatgagcagcgataacaggaacaacaaaaaccactgcagaatcggcattccatgctccctgaatgatatttagcgaaaccttaattaatcatagagagtaacggggtaagaataaaataatgaggataagaaaaaagggaaaatgtaccggatggcgagggttgcgtcgccatccggttgtcaattaacgcttcagcgccgatttaaaatcgcgtttatcgtagccggtatacagctgacgaggacgggcgattttcatgccgtcagtgtgcatttcattccagtgtgcaatccagccaacggtacgcgccatggcgaagatcacggtgaacatggaggacggaatgcccatcgctttcagaatgatgccggagtagaagtctacgttcgggtacagtttcttctcgatgaagtacgggtcgttgagcgcaatgtgctcaagctccatcgccacttccagcagatcgtctttggtgcccagctctttcagcacttcgtggcaggtttcacgcatcacggtggcgcgcggatcgtagtttttgtaaacacggtgaccgaagcccatcaggcggaaagaatcattcttgtctttcgcacggcgaacaaattccggaatgtgtttaacagagctgatttcttccagcattttcagcgcggcttcgttggcgccgccgtgcgcgggtccccacagggaggcgatcccggcggcaatgcaggcgaatgggttggcgccgcttgaacctgcggtacgtaccgttgacgttgaggcgttctgctcatggtcagcgtgcaggatcagaatacggtccatcgcgcgctctagtaccggattcacttcataggtttcacacggcgtggagaacatcatgttcaggaagttaccggcgtaggaaaggtcgttgcgcggataaacaaacggctgaccgattgaatatttgtaacacatcgccgccatggtcggcattttggacagcaggcggaacgccgcgatttcacggtggcgcggattgttcacatccagcgagtcgtggtagaacgctgccagcgcgccagtgatcccgcacattaccgccatcggatgtgagtcgcgacggaaagcatggaacaggcgagtgatttgctcatggatcatcgtatggcgggtgactgtcgttctgaactcgtcatactcttcctgcgtcggtttttcgccgtacagcaggatgtaacagacttccagatagttggaatcggtagcaagctggtcaatcgggaaaccgcgatgcaacaaaatgccttcgtcgccgtcgatgaaggtgattttagattcgcaggatgcggtagaggtgaaaccagggtcaaaagtaaaaactccttttgaaccgagactacgaatatcaataacatcttgaccgagtgtaccttttagcacatccagttcaatagcagtgtcaccagtaagggtgatttttgcctttgtatcagccatttacggtctccttagcgccttattgcttaagactgccggaactcagacttgccttctccacgtcatcttcctcgtcgttagtgcagggaagattctgtgtatgcatcaatcaaccgttaccagtttgttatttggctcgccgctctgtgaaagaggggatgacctgggtacagagcaatgggcgcttgcaggtaacgacttgattaatttcgaattagcagcaaatcaggaacgtagcaatccgagtaatgtaacctgtctatcactaataactgtcctgaaagaatgggtcaatatcattgtactgttgcataacttattaacaggtgaaagagtgaccccataacttttacgcattatatgctttttctggtgtcgtttgtaacaattttgtttaatgtttgtcaaatcagatgattgaaaattaaaaaaatgttgttatcgtgacctgtgtcactgttcaggataaaacccgacaaactatatgtaggttaattgtaatgattttgtgaacgtcctatactgccgccaggtctccggaataccctgcaatcccgagccacccagcgttgtaacgtgtcgttttagctactggaagcagtgttttacatgacgcgcagttatagaaaggacgctgtctgacccgcacgcagaccggaggaaggaaatcccgtcgtctttctggctacaggtagattcacctctgtaaccgaagtcttaagggaataataagaacagcatgtgggcgttattcatgataagaaatgtgaaaaaacaaagacctgtcaatctggatctacaaacgattcggttccccatcacagcgatagcgtccattctccatcgcgtatccggtgtgattactttcatcgccgtcggcatactactgtggctactgggcaccagcctctcttctccggaaggattccagcaggccgccgacatcatggacggcttcatcgttaaatttatcatgtggggcatccttaccgcgctggcgtatcacgtcatcgtgggaattcgtcacatgttaatggattttggctatctggaagaaacattcgaagcgggtcaacgctctgccaaaatctcttttgttatcactgtcgtgctttcacttctcgcaggagtcctcgtatggtaagcaacgcctccgcattaggacgcaatggcgtacatgacttcatcctggtccgtgctaccgctatcgttctgacgttatacatcatctacatggtgggttttttcgccacgagcggcgaactgacctttgaagcctggaccggtttcttctcatcggccttcaccaaagtcttcaccctgctggcgcttttttccatcttgattcatgcctggatcggcatgtggcaggtgttaaccgactacgttaaaccactggcagtgcgtctgatactgcaactcgttatcgttgttgcgctggtggtttacgtcatctatggatttgttgtggtgtggggtgtgtaatgaaactgccagtcagagaatttgatgctgttgtgattggtgccggtggcgcaggtatgcgcgcggcgctgcaaatttcccagagcggccaaacctgtgcgctgctctcgaaagtcttcccgacccgttcccataccgtttccgcgcagggcggtatcaccgtggcgctcggcaatacccatgaagataactgggaatggcacatgtacgacaccgttaaggggtcggactacattggtgaccaggatgccatcgaatatatgtgtaagaccggaccggaagcgattctggaactggagcacatggggctaccgttctcccgtcttgatgatggacgtatctatcagcgcccgttcggcggccagtcgaaaaactttggcggcgagcaggcggcacgtaccgcggcggcggctgaccgtaccggtcacgccttgctacacacgctgtatcaacagaatttgaaaaaccacaccacgattttctccgaatggtatgcgctggatctggtgaaaaaccaggatggcgcggtggtggggtgtaccgcactgtgcatcgaaaccggtgaagtggtgtacttcaaagcccgcgcgacggtgctggcgaccggcggcgcaggccgtatctaccagtccaccaccaacgctcacatcaacaccggtgacggtgtcggtatggcgctgcgtgccggtgtcccggtgcaggacatggaaatgtggcagttccacccgaccggcatcgccggggcgggcgtgctggtgacagaaggctgccgcggcgaaggcggttacctgctgaacaaacacggcgagcgctttatggagcgttatgcgccgaacgccaaagacctggcgggtcgtgacgtggtggcgcgttccatcatgatcgaaatccgtgaaggccgcggctgtgatggtccgtgggggccgcacgctaaactgaaactggatcacctgggtaaagaggtgctggaatctcgcctgccgggtatcctggagctgtcccgtactttcgcccacgttgacccggtgaaagagccgattccggttatcccgacctgccactacatgatgggcggtattccgactaaagtgaccggtcaggcgctgaccgtgaacgagcagggcgaagacgtggtcattccggggctgtttgcggtaggcgaaatcgcctgtgtatcggttcacggcgccaaccgtctgggcggtaactcactgctggatctggtggtctttggccgcgcggcggggctgcatttacaggaatccatcgccgagcagggcgtgctgcgcgacgccagcgagtctgacgttgaaggttctctggagcgcctgaatcgctggaacaataaccgcaatggcgaagatccggtggctatccgcaaagcgttgcaggagtgtatgcagcataacttctccgtattccgtgaaggcgacgcgatggcgaaagggcttgagcagttgaaagtgatccgcgagcgtctgaaaaacgcccgtctggatgacacgtccagcgagtttaatacccagcgtgttgagtgtctggagctggataacctgatggaaaccgcctacgccactgccgtatcagccaacttccgaacggaaagccgcggcgcgcatagccgcttcgatttcccggagcgtgatgatgccaactggttgtgtcataccctgtatcagccgcaaacggaatccatgacgcgccgaagcgtcaatatggagccgaaactgcgtccggcgttcccgccgaagattcgtacttattaattgcggagacaggatgatgaaactcgaattttcgatttatcgttataacccggatgtcgataacgctccgcgtatgcaggattacaccctggaaggcgaagaagggcgcgacatgatgctgctggatgcgttaatccagcttaaagaaaaagatcccagcctttctttccgccgttcctgccgcgaaggtgtgtgcggttctgatggtttgaatatgaacggtaagaatggtctggcctgtattacccctatttcggcgctgactcagccgggtaagaagattgtgattcgcccgctgcccggtttgccggtgatccgcgatttggtggtagacatggggcaattctacgcacaatatgagaagattaagccttacttattgaataatgggcaaaatccaccggctcgtgagcatctgcagatgccggagcagcgtgaaaaactcgatgggctgtatgaatgtattctttgcgcctgttgctcaacatcctgcccgtcattctggtggaacccggataagtttatcggtccggcggggctgctcgcggcgtatcgattcctgatcgatagtcgtgataccgagactgacagtcgtctggaagggatgagcgatgcattcagcgtattccgctgtcacagcattatgaactgcgtcagtgtatgtcctaagggactgaacccgacgcgcgctatcggccatattaagtcgatgctgttgcagcgtagcgcataagtagttgtagtggttgccggatggcgacgtacagtcttatccggcctacaggcgcaaccccgtaggcctgataagcgcagcgccatcaggcaatagaagtgcaggaaacctctaaaaactgccatatgattagtaataatcgagatgttcagagcgagacaaggcgcggtctgaacgaatcttcgggagcatagttaactatgtgaccggagtgagcgaaggccgcaacgcagtcgtagcctgaacagcgaagattattagacagtttttaaaggttccttagcggacgcagatgacacgacagtccgcaacaagtgaaccccggcacgcatacagcgtatgcgtggttagtatccacggcgaaatactcgtcatagttcacgttgcatgtgcgttggctgcacttgctcaccccggtcacttactggatgtaagctcccagggattcgcaagcttgccgccttcctgaaacgtgacctatttagagtattaaataagcagaaaagatgcttaagggatcacgatgcagaacagcgctttgaaagcctggttggactcttcttacctctctggttcgaatcagagctggatagaacagctctatgaagacttcttaaccgatcctgactcggtagacgctaactggcgtttgacgttccagcagttacctggtaccggagtcaaaccggatcaactccattcaaaaacacgtgaatatttccggcggcaggcgttggctggctcacgtcactcttctacgatttccgaccctgacaccaatgtgaagcaggttaaagtcctgcagcttatcaacgcttatcgtttccgtggccatcaacatgcaaacctcgatccgctgggactgtggaagcaagaacgcgtggcggatctcgatccttctttccatgatttgaccgaggccgatttccaggaaaccttcaatgtcggctcctttgccagcggcaaagagacgatgaagctgggcgagctgctcgacgcgctcaaacagacctactgcggcccgattggcgctgagtatatgcacatcaccagcaccgaagagaaacgctggatccaacagcgcatcgaatccggtcgtgcggcctttagcgctgacgagaaaaaacgcttcctgaacgaactgaccgccgctgaagggctggaacgttatctgggcgccaaattcccgggtgcgaaacgtttctcgctcgaggggggagatgcgctgatacccatgctgaaagagatggttcgccatgcgggtaacagcggcactcgcgaagtggtgctggggatggcgcaccgcggtcgcctgaacgtgctgatcaacgtactgggtaaaaaaccgcaggatctgttcgacgaatttgccggtaagcataaagaacatctgggtaccggcgacgtgaagtatcacatgggcttctcgtcagatatcgaaaccgaaggcggtctggttcacctggcgctggcgtttaacccatcgcatctggaaattgtgagcccggtggtgatgggctccgtgcgcgcccgtctggacagactggacgaaccgagcagcaacaaagtgttgccgatcactattcacggcgacgccgcggtgaccggccagggcgtggttcaggaaaccctgaacatgtcgaaagcgcgcggttacgaagtgggcggtacggtacgtatcgttatcaacaaccaggtgggtttcaccacctctaacccactggatgcgcgttcaacgccttactgcaccgatatcggtaaaatggtccaggcgccgattttccacgtcaatgcggacgatccggaagccgtcgcttttgtgacccgtctggcgctggacttccgtaatacctttaaacgcgatgtctttatcgatctggtgtgctaccgccgtcacggccacaacgaagccgacgagccaagcgcaacccagccgctgatgtaccagaaaatcaaaaagcatccgacgccgcgtaaaatctacgccgacaaactggaagctgataaggtcgcaacgctggaagatgccactgaaatggtcaacctctatcgcgatgcgctggatgcaggcgaatgcgtggtgaaagagtggcgtccgatgaatatgcactcgttcacctggtcgccgtatctaaaccacgaatgggatgaagcatacccgaacaaggtagaaatgaagcgtctgcaggagctggcaaaacgtatcagcaccgtgccggaagccattgaaatgcagtctcgcgtggcgaaaatttatggcgaccgtcaggcaatggcggcaggcgagaaattgtttgactggggcggcgcggaaaatctggcttacgccacgctggtcgatgaaggcattccggtgcgcctgtccggggaagactctggtcgcggcaccttcttccatcgtcatgcggtgatccacaaccagacgaacggctcaacgtatacgccgttgcagcatattcacagcggtcagggacagtttaaagtctgggactccgtgctgtctgaagaagcggtactggcttttgaatacggttatgccacggcggaaccacgtaccctgactatctgggaagcgcagtttggcgattttgccaacggcgcgcaggtagtgattgaccagttcatctcctccggcgagcagaaatggggccggatgtgcggtctggtgatgctgttgccgcatggctatgaagggcagggcccggagcactcttccgcgcgtctggaacgttatctgcaactttgcgccgagcagaatatgcaggtttgcgtgccgtccaccccggcgcaggtctaccatatgctgcgccgtcaggcgctgcgcgggatgcgtcgtccgctggtggtgatgtcgccgaaatcgctgctgcgtcacccgctggcggtttccacgcttgatgaactggcgaacggttccttccagccggccattggcgaaattgacgagctggaccctaaagccgtaaaacgcgtggtaatgtgttctggtaaggtttattacgacctgctggaacaacgtcgcaaaaacgaccagaaagatgtcgctatcgtgcgcatcgaacagctctatccgttcccgcataaagcggtgcaggaagcgctgcaaccatacgctcacgtccatgattttgtctggtgccaggaagagccgctcaaccagggcgcatggtactgcagtcagcatcatttccgtgaagtgactccgtttggggccgctctgcgttatgcaggtcgcccggcctccgcctctccggcggtagggtatatgtccgttcaccagaaacagcaacaagatctggttaatgacgcgctgaacgtcgattaaataaaggataaataatgagtagcgtagatattcttgttcccgacctgcctgagtccgtagcggacgcgaccgtcgccacctggcataaaaaaccgggcgatgcggttgttcgtgacgaagtgctggtagaaatcgaaactgacaaagtggtactggaagtaccggcatcagcggacggcattctggatgcggttctggaagaggaggggacgactgtcacctctcgccagatcctgggtcgcctgcgtgaaggaaacagcgcgggtaaagagaccagcgcgaaatctgaagagaaagcgtctacgccggcacagcgccagcaggcgtcgctggaagaacaaaacaacgatgcgctcagcccggcgatccgtcgcctgctggctgaacacaatctggaagccagcgccattaaaggcactggtgtgggtgggcgtctgacccgtgaagatgtggaaaaacatctggcgaaaggcgagtctaaagcacccgctgttgaacctgcagcacaacccgctctgggcgcgcgcggcgaaaaacgcgtgccaatgacccgcctgcgcaagcgcgtggccgagcgtctactggaagcgaaaaattccaccgccatgctgacgaccttcaatgaagtcaacatgaagccgattatggatttgcgtaagcagtatggcgaagtgtttgaaaaacgtcatggtatccgcctgggctttatgtccttctacgtgaaagcggtagtggaagcgctgaagcgttatccggaagtgaacgcctctatcgacggcgatgacgtggtgtatcacaactactttgatgtgagcatggcggtgtctacgccgcgcggcctggtcacgccggtcctgcgtgacgtggatacgctgggcatggctgacatcgagaaaaaaattaaagaactggctgtcaaaggccgcgacggcaagctgaccgtagaagacctgaccggtggtaactttaccattaccaacggcggcgtattcggttcgctgatgtctaccccgatcatcaacccgccgcagagcgcgattctgggaatgcatgctattaaagacaggccgatggcggtggatggcaaggtggaaatcctgccgatgatgtacctggcgctctcttacgatcatcgcctgatcgatggtcgcgaatccgtgggcttcctggtcaccatcaaagagttgctggaagatccgacccgtctgctgttggacgtgtagtcagcaagagcatcacctgctacctgtaggccggataaggcgttcacgccgccatccggcgatggtgtaatgcctgatggcgcgcagctttcaggcctacaggtctaaagataacgattacctgaaggatggacagaacacatgaacttacatgaatatcaggcaaaacaactttttgcccgctatggcttaccggcgccggtgggttatgcctgtactactccgcgtgaagccgaagaagccgcgtctaaaatcggcgctggcccgtgggtagtgaaatgtcaggttcacgctggcggccgcggcaaagcgggcggtgtgaaggtagtaaaaagcaaagaagagattcgcgccttcgcggaaaactggctgggcaaacgtctggtgacctatcaaacagacgctaatggccaaccggtaaaccagattctggttgaagcggcgaccgacatcggcaaagaactgtacctcggcgcggtagttgaccgtagttctcgtcgcgtggtctttatggcgtctaccgaaggtggcgtagagatcgaaaaagtcgcggaggaaaccccgcatctgatccataaagtcgcgctcgatccgctgaccggcccgatgccgtatcagggacgggaactggcgttcaaattgggtctggaaggtaaactggtgcagcagttcaccaaaatctttatgggtctggcaaccattttccttgagcgcgacctggcgctgatcgaaatcaacccgctggtgattactaagcagggcgatctgatttgcctcgacggcaagctgggcgctgacggcaacgcgctgttccgccagccggatctgcgtgaaatgcgtgaccagtctcaggaagacccgcgtgaagcgcaggcagcgcagtgggaactgaactacgtcgcgctggacggcaacatcggttgcatggtgaacggcgcgggtctggcgatgggcaccatggacatcgttaagctgcatggcggcgaaccggctaacttccttgacgtgggcggcggcgcaaccaaagagcgcgtcaccgaagcgtttaaaattatcctctcggatgacaacgtgaaagcggttctggttaacatcttcggcggtatcgtccgttgtgacctgattgccgacggtatcatcggcgcggtggaagaagtgggcgtgaacgttccggtggtggtgcgtctggaaggcaacaacgccgaactcggcgcgaagaaactggctgacagtggcctgaatattattgcagcgaaaagtctgacggatgcagctcagcaggttgttgccgcagtggaggggaaataatgtccgttttaattaataaagataccaaggttatctgccagggcttcaccggtagccaggggactttccactccgaacaggcgattgcttacggtacgcagatggtgggcggcgtaacgccgggcaaaggcggcaccacgcatctggggctgccggtgttcaacaccgtgcgcgaagcggtagaagctaccggtgcgaccgcatccgttatctacgtcccggcgccgttctgcaaagactccatcctggaagcgattgacgcaggcatcaaactgattatcaccatcaccgaaggtattccgacgctggatatgctgaccgtgaaagtgaagctggacgaagcaggcgtgcgcatgatcggcccgaactgcccaggtgtgatcaccccgggcgaatgcaaaatcggcatcatgccgggtcacattcataagccgggtaaagtgggtatcgtttcccgttccggcacgctgacctacgaagcggttaagcagaccaccgactacggtttcggccagtccacctgcgtgggtatcggcggcgacccgattccgggctctaactttatcgatatcctgaaactgttccaggaagatccgcagactgaagcgatcgtgatgatcggtgagatcggcggtagtgcagaagaagaagcggcggcttacattaaagaccacgtgaccaagccggttgttggctatatcgcgggtgttaccgcgccgaaaggcaagcgtatgggccacgcgggcgccatcattgccggtggtaaaggcactgcggatgaaaaattcgcagcgctggaagccgcgggcgtgaaaaccgttcgcagcctggccgatatcggcgaagcgctgaaagcaattataaaataaaactcgctgttcctgcgggaacagataaatgtccgttttcgacatggttggccacctttacggtggccttttttatggctttattgtttgtggcaaagtacgggtgaagcatccgggatataaaattattggctttgtaaatactgaactataggaaaataatgcctcattaaaaaaacatggtggagtctaaaaataattgataataaccgtctggcagcggcagtaaatttactcagtttgctggttaactcttttgcagcaaatacagatgctgtcttagtgaaatacctgccgacctcactggagacggattatgcgctttccgccatgaaaaaaacgcattgcagcattacactatgttgacgctaacctctatagtaaattgacgcttgactctgtggccgcgcatgtttgcctgagcgcgaactacatgtctcctcagatgtatcgcgcttacacagactgcttgtttaatggcagaataaaacagctattttaatcataagagtaccgacattatttccatgaagtattaaagatatcgtttaataaatcatatgaacttttgctggttaaaagaggttaactttaaaaattattaagaacttattgacactattcgttcgtgattaatcatgtttaaaggatatttatggctgcgaataaacagaattatcactatgagtgacgtagaaattgagggtgaatctgtgaaggtgataacagaatcttcgctataataattatagagaggtaaatacggtgttattgaaataaagaaaaattagcgaataaaatgtttgtttctggctatctggaaagcttattagcgataattaaggcgataacctggcaagatgagcctggccattagtcgtcgggaaagggaagttggggcagggtaatcccggtgggatgatggcgcgtgtgcaatgagatagtttctttgctgtgttaattataagtaaaataaaaatagactaaatgtataaaataataagtattgataacctgcagaaaaaatctgtgagctatttagcaataattgaacatcaatgtggaatgttttttactggatgcggggcagtaaaaaacgcacaaaatgtttagccttatcgaataagtctctttttacagggggtttgaaattactctttgcaaaaacaaaaagttaacaaaaaattcaccatgcattcaatgaataaacattattaacattaacttcaaaaattgattttaatcaatatttaaatgttggaaaagagcatcaaaactggttaaattgtccgtgatcaaattccctgaaaagcgatagattagccataaattgatcgctgtcgaaaaaagcaaatctgacccactaaaaacctgtttattgtaagggttttacggcgtaatatatttgcgggatcaatttgggttttttattaacatgtttgtaacttttcatcattactgtttccttcccgaggggatagtacgatggaaggccgcaaataaatttgtattggggcatgcgtgtgaccctttctaacggggttcactctcggagtcttcatgcgatgagcaaggagtcatgatgttagatatagtcgaactgtcgcgcttacagtttgccttgaccgcgatgtaccacttcctgtttgtgccgctaacgctcggtatggcgttcctgctggccattatggaaacggtatacgtcctttccggcaaacagatttataaagatatgaccaagttctggggcaagttgtttggtatcaactttgctctgggtgtggctaccggtttgaccatggagttccagttcgggacaaactggtcgtactactcccactatgttggggacatcttcggtgcgccgctggccatcgaaggtttgatggccttcttcctcgaatccacctttgtaggtctgttcttcttcggctgggatcgtctgagtaaagttcagcatatgtgcgtcacctggctggtggctctggggtccaacctctccgcgttgtggattctggtagcgaacggctggatgcaaaacccaatcgctgcggatttcaatttcgaaaccatgcgtatggaaatggtgagcttctctgaactggtgctgaacccggtagcacaggtgaaatttgttcacactgtggcgtccggctatgtcaccggcgcgatgttcatcctcggtatcagcgcttactacatgctgaaaggtcgtgacttcgcctttgctaaacgctcctttgctattgccgccagcttcggtatggctgccgtactgtccgttatcgtactcggcgacgaatccggttacgaaatgggcgacgtgcagaaaaccaagctcgctgcgattgaagctgaatgggaaacgcaacctgctccggcctcctttaccttgttcggtattcctgaccaggacaaacaggaaaaccatctggcgattcagatcccttatgcgctcggtattatcgctacgcgttccgtggacacgccggttattggcctgaaagatctcatggttcagcatgaagagcgtatccgtaacgggatgaaagcctatgaactgctggagcagctgcgcgccggttctaccgaccaggccgttcgcgaccagttcaacagcatgaagaaagatctcggttacggcctgctgctgaaacgctatacgcctaatgtgactgacgcgaccgaagcgcagatccagcaagcgacgaaagattccattcctcgcgttgcgccgctgtacttcgctttccgtatcatggtggcgtgcggcttcctgctgctggcgatcatcgcactttccttctggagcgtgattcgtaaccgcatcggtgagaaaaaatggctgttgcgcgcggcgctatacggtattccactgccgtggattgcggttgaagcaggttggttcgtcgccgagtatggtcgtcagccgtgggcgatcggcgaagtgttgccgacagccgtagcgaactcatcgctgaccgtgggcgatctgctgttctccatgttcctgatttgcggcctgtataccctgttcctggtggcagaattgttcctgatgttcaaatttgcacgccttggcccaagcagcctgaaaaccggtcgctatcactttgagcagtccaccgtgacttctcagccggcacgctaagacaggagtcgtcaaatgatcgattatgaagtactacgttttatctggtggctgctggttggcattttgctaattggtttcgctgtcaccgatgggttcgacatgggggtggggatgctcacccgtttcctcggtcgtaacgacaccgaacgtcgaattatgattaactctatcgctccacactgggacggtaaccaggtgtggttgatcaccgcgggcggtgcgttgtttgctgcctggccgatggtttacgccgcggcgttctccggtttctatgtggcgatgatcctggtgctggcgtctttgttcttccgtccggtcggttttgattaccgttccaagattgaagacccgcgctggcgcaacatgtgggactggggcgtgttcatcggtagctttgtgccgccgctggtgattggcgtggcctttggcaacctgttgcagggcgtaccgttccacgtggatgagtatctgcgtctgtactacaccggtaacttcttccagttgctgaacccgtttggtctgctggcgggtatcgtaagcgtagggatgatcatcacgcagggggcgacttacctgcaaatgcgcaccgttggcgaactgcacctgcgcgcgcgcgccacctcgcagattgcggcgctggtgacattagtgtgctttgcgctggcgggcgtttgggtaatgtatggtattgatggttatgtcgtgacatccgcgattgatcatcatgccgcctctaacccgctgactaaagaagtggcgcgtgaagctggcgcctggctggtgaactttaataatgctccgatcctgtggttggttccggctctgggcgtggttctgccgctgctgactatcctgacttcccgtatggagaaaggcgcgtgggcattcctgttctcttcgctgaccctggcctgcattattctgacggcgggtatcgctatgttcccatttgtgatgccgtccagcacgatgatgaatgccagcctgaccatgtgggatgcgacatccagccagatgacgctgaacctgatgacctgggttgcggcggtgttcgtaccgatcattctgatctacaccagctggtgttactggaaaatgttcggtcgtatcactaaagaacatattgaaagcaacacccactctctgtactaagtaaggagcttaaaatgtggtatttcgcatggattctgggaacgcttcttgcctgtgcattcgggatcattaccgccctggcgcttgagcacgttgaagcgggtaaaaccggtcaagaagaaagctaatgattcatattgtcgctatgcaatatacaaaatcatttaagttgcatcgcggcggcaaggctgcgaatccccaggagcttacatcagtaagtgactggggtgtgcagccgcagccaacaaagaggcagcttagaggatgaagtatatttatgcggtaatggacaagcgcccgttaagggcgctttccttcgtgatggcgatagtgctggcaggatgtatgttctgggacccgtcacggtttgccgccaggaccagcacgcttgaaatctggcacggattattgctgatgtgggcggtttgcgcaggcataatccacggtgtgggttttcgccctgaatccgtacactggcaagggattttttgtccgctccttgcggatatcgtccttatcgtcggcctgattttcttcttcttgtgaataagaaacctccttaaaaatataggggcttgcataagcccatatatttttactctcccttaacttccccccattcccaagcctcattcccacgcgtatagtagcaacgtttaaaagctctacttttgttgcattaccgggatgtaaagtgaatacaaggcgatatacaacggcattcttgaggcattacggcggcaagcggatgacgccaacaaagaggctgcagggatgaataagtatatgtttcgatggccaattcgagtttattacgaagacacggacgccggcggtgtggtttatcacgccagctatgtcgctttttatgaaagagcgcgcacggagatgctgcgtcaccatcacttcagccaacaggtgctgctggcggagcgggtcgcctttgtggtgcgcaagatgacgctggaatactatgcgcctgcgcggctcgacgatatgcttgaagttcaaacagaaattacgtcaatgcgtggcaccgctttggttttcacgcaacgcattgtcaacgcagagaacacgctgctaaatgaagcagaggttctgattgtttgcgttgatccactcaaaatgaagcctcgtgcgcttcctaagtctattgtcgcggagtttaagcagtgactgacatgaatatccttgatttgttcctgaaggcaagccttctggttaaacttatcatgttgattttgattggtttttcaatagcatcctgggccatcattatccagcgaacgcgtattctgaacgccgctgcgcgtgaggcggaagcgtttgaagataaattctggtccggaatcgaactatcgcgtctgtaccaggaaagccaggggagacgcgatagtctgtcgggctcggaacaaatcttttatagcgggttcaaagagtttgtccggctccatcgcgccaacagccatgcgccggaggcagtggtagagggggcgtcgcgtgcgatgcgcatctccatgaaccgagagctggaaacgctggaaacgcatatcccgtttcttggcacggtaggctctatcagtccttatatcggtctgtttggcaccgtatgggggattatgcatgcgtttatcgccctgggcgcggtgaaacaggcgactctgcaaatggttgcgccgggtattgccgaagcattgattgccacggcgattggtctgtttgccgccatccctgcggttatggcttacaaccgactgaatcagcgcgtgaacaagctggaactgaattacgacaactttatggaagagttcaccgcgattctgcaccgccaggcgtttaccgtaagcgaaagcaacaaggggtaagccatggccagaacgcgtggacgaggtcgtcgcgaacttaagtccgaaatcaatattgtaccgctgctcgacgtactgttggtgctgctgctgatctttatggcaaccgcgccgatcattacccagagcgtggaagtcgacttgcccgaggcgaatcagtcgcaggcggtcagtagtaacgacgatccaccggtcattattgaggtttccggagtagggcaatacagcgtagtggttgataaagatcgaatggatcaactgccgtctgaacaggtgatcgcagaagtaaagcgtcatctgcaggctaatccgaaaacagtctttttaatcggcggcgcgaaagaggtgccgtacgatgaaataattaaagcgctgaacttgttacacagcgcgggcgtaaaatcggttggcttaatgacgcagccaatctgaagtctgcgtcccgttggcttgaaagacggcgagtaacaggcgaacagttttttgggaaccgagagtgtcaaaggcaaccgaacaaaacgacaagctcaaacgggcgataattatttcagccgtgctgcatatcatcttatttgcagtgctgatctggagttcgtttgatgagcatatagaggcttctgccggcggcggcggtggttccgctatcgacgcggtgatggtcgatcctggcgccgttgtgcagcagtacaaccgtcagcaggatcaacaggccagcgccagacgcgcggaagaagagcgtaaaaagctgcaacagcagcaagcagaggagctgcagcagaagcaggctgctgaacaggagcggttgaaacaacttgagaaagaacgtttagcggctcaggagcagcaaaagcaggctgaagaagcggcaaaactggcgcaacagcagcagcaacaggccgaagaagcggcgaaagcggcggcggacgcgaagaaaaaagcggaggccgaggcggcgaaagcggcggcggacgcgaagaagaaagcggaagccgaagcggtaaaagcggcagcggacgcgaagaagaaagcggaagccgaagcggcgaaagcggcggcggacgcgaagaagaaagcagaggccgaagcggcgaaagcggcggcggaggcgaagaagaaagcggaagccgaagcggcgaaagcggcggcggaggcgaagaagaaagcggatgccgaggcggcgaaagcggcggcggaggcgaagaagaaagcggatgccgcggcggcgaaagcggcggcggaggcgaagaagaaagcggatgccgcggcggcgaaagcagcggcggacgctaagaagaaagcggctgccgaaaaagcggccgccgcagaaggcgtcgacgatctgcttggcgatctcagctcgggtaagaatgcgccgaaaaccggcggcggcgcgaaagggaatggtcagccatcgaaagatagcggtacatcgggcgctaacggtggggcgacaggcgctgatatcagcgcctacgcgaaacagattcaggtcgccattcagagccgtctgtacgatgcgagcctgtatcagggcaaacaatgtgtcttgcatattagcctggcgccggatggctcattaaaaagcattacgtctgagggcggcgatccggcgctttgtcaggcggcgttaatggcggcaaaaaccgcgaaaattcctaaaccgccaagccaggctgtttatgagaaaataaaggatgccaaactagactttaaactgtagatacttttctttatggaagttagagcagttgagttgttactggtcctggtggttttgtgtatttgagtttgttaacattctgctaaattatcgtgggtcgcaggcccaggtatgggagatatgatgaagcaggcattacgagtagcatttggttttctgatgctgtgggcggcggtgctgcacgcagaagtccgtatcgagatcacccagggggtggactcggcgcgaccgattggcgttgtgccttttaaatgggccggaccgggcgctgcgcctgaagatatcggtggcatcgtggcggcagatttacgcaatagcggtaaatttaatccgctagaccggtcccgactgccgcagcagccagccaccgctcaggaagttcagcctaccgcatggtctgcgctgggtattgatgccgtcgtcgttggacaggtaacgccgaatccggacggttcctacaatgttgcttatcagctggttgacactggcggcgcgccggggactgtactggcgcaaaattcttataaagtgaacaagcagtggctgcgttatgcaggtcataccgccagtgacgaagtctttgaaaaactgacgggcattaagggcgcgttccgtactcgtatcgcctatgtggtacagactaatggcggtcagttcccgtatgaactgcgtgtgtcggattacgatggttacaatcagtttgtggtgcaccgttctccgcagccgttgatgtctccggcgtggtctccggacggctcaaaactggcttacgtgacatttgaaagcggtcgctccgcgctggttatccagacgctggcaaacggcgcagtgcgtcaggttgcgtccttcccgcgtcacaacggcgcgccggccttctcgccggatgggacgaaactggcgttcgcgttatcgaaaaccggaagtctgaacctgtacgttatggatctcgcctccggtcagattcgtcagataacggacggccgtagcaacaatacggagccgacctggttcccggacagccagactctggcctttacctctgaccaggctggacgtccgcaagtgtataaaatgaacattaacggcggtgcggcgcagcgtattacctgggaaggttcgcaaaaccaggatgcggatgtcagcagcgacggtaaatttatggtaatggtaagctcaaataacgggcagcagcacattgccaaacaagatctggtgacgggtggcgtacaggttctgtcgtcaacgttcctggatgaaacgccaagtctggcacctaacggcacgatggtaatctacagctcttctcaggggatgggatctgtgctgaatttggtttctacagatgggcgtttcaaagcgcgtcttccggcaactgatggtcaggtgaaatcgcctgcctggtcgccgtatctgtgataataattaattgattactaaaggaattaaagaaatgcaactgaacaaagtgctgaagggcctgatgattgccctgcctgttatggcaatcgcggcatgttcttccaacaagaacgccagcaatgacggtagcgaaggcggtatgctgaacggcgccggcactggtatggacgctaacggcaacggcaacatgtcatctgaagagcaagcgcgtctgcagatgcagcagctgcagcagaacaacatcgtttacttcgatctcgacaagtacgatatccgttctgacttcgcggcaatgctggatgcgcacgctaacttcctgcgtagcaacccgtcttacaaagtcaccgtagaaggtcacgcggacgaacgcggtactccggagtacaacatctccctgggtgagcgtcgtgctaacgccgttaaaatgtacctgcagggtaaaggcgtttccgctgaccagatctccatcgtttcttacggtaaagaaaaacctgccgtactgggccacgacgaagcggcttacgctaagaaccgtcgcgctgtactggtttactaagagaattgcatgagcagtaacttcagacatcacctgttgagtctgtcgttactggttggcatagcggccccctgggccgcttttgctcaggcgccaatcagtagtgtcggctcaggctcggtcgaagaccgcgtcactcaacttgagcgtatctctaacgctcacagccagcttttaacccaacttcagcagcagctctccgataatcagtccgatatcgattctttgcgcggccaaatccaggaaaatcagtatcaactgaatcaggtgatggagcgccagaagcaaattatgctgcagctggggagcttaaataatggcggcgcagcgcagccagcagctggtgaccagagcggggcggcaaccactgcgacccccgccccggatgccggtacggcaacctcaggggcgccggtacaaagtggcgatgcgaataccgattacaatgcggcaattgcgctggtgcaggataagtctcgccaggatgatgcgattgtggcgtttcagaacttcatcaagaaataccctgattctacttatcagccgaacgccaattattggctgggccagttgaattacaacaagggtaaaaaagatgacgccgcctattatttcgcctcggtagtaaaaaactatcctaagtcgccgaaggctgcggacgcgatgtacaaagttggcgttatcatgcaggacaaaggtgatacggcaaaagcgaaagcagtttatcagcaggtgattaacaaatatccaggcactgatggcgcgaaacaggcgcagaagcgtcttaacgcgatgtaatgcgtaccatgcgaccagaaaacgccttttttctggtcgcgtcgtgcgattcctaagcagttgagccctctgcgtcgaaatttttgttgcgctcaaatctgaaatcagtaatatatgccgccgttgccacgggatattaaacaactcgaaagcaacgcaaaagtgggtcgttagctcagttggtagagcagttgacttttaatcaattggtcgcaggttcgaatcctgcacgacccaccaatcgttcggtggaaacgagaataaaacgtgaaggataacgttgcgtcagcaacggcctgtagggcgaggcgaagccgagtcatcctgcacaccactaacttcggttagtcagtaatatccagcgtagtatcgggtgattagctcagctgggagagcacctcccttacaaggagggggtcggcggttcgatcccgtcatcacccaccactcgggtcgttagctcagttggtagagcagttgacttttaatcaattggtcgcaggttcgaatcctgcacgacccaccaattttctaattggtgccgagtaaaaatatttcaggtagtcccaccgtatgggtcgttagctcagttggtagagcagttgacttttaatcaattggtcgcaggttcgaatcctgcacgacccaccaatatacaaggtggtaactggtagagaacgtgaaggttaacgttgctttagcaacggcccgaagggcgaggcgaagccgagtcatcctgcacgacccaccatcctgaatgattgaagcagtaacccttatccaaggggtcgttagctcagttggtagagcagttgacttttaatcaattggtcgcaggttcgaatcctgcacgacccaccaatgtaaaaaagcgccctaaaggcgcttttttgctatctgcgatatggaagattcgaacctgccgcaggttcgggtctcacgtagtgagacaacggagccgcttgcggcgacggcccgaagggcgagcaaagcgagtcatcctgcacgacccaccaatgtaaaaaagcgccctaaaggcgcttttttgctatctgcaatatgaagattcgaacctgccgcaggttcgggtctcatgcagtgagacaacggagccgtttacggcgacggcccgaagggcgagcgaagcgagtcatcctgcacgacccaccaatgtaaaagagggcgctggcggcgcctttttgctatctgcaatatggaagattcgaacctgtcgcaggttcgggtcttgcctgatgcgctgcgcttatcaggcctacagacggcaccgctcacgtaggccagataagacgttacgccgccatcagatacggggctacgtaattattgtgactttccttattgaatcagctatcttgtttagcatataaaacaaattaaccgattgtggcgtttattacgctttcattcggttgtttcgttaagtcagtaaaacgagaagccacgatgagcgtaatgtttgacccacaagccgcaatctacccgttcccgccgaaaccaacgccgttgaacgacgacgaaaagcaattttatcgtgagaaaatcaagcggttgctcaaagagcgcaatgccgtcatggtggcgcactactacaccgatccggaaattcaacagttagcagaagaaaccggcggctgtatttccgactcactggaaatggcccgtttcggcacgaagcacgccgcatccacgctgctggtagcgggcgtacggtttatgggggaaaccgccaaaatcctcagcccggaaaagaccattcttatgcctaccctggcggcggaatgttcgctggatttaggctgcccaatagacgaatttagcgctttttgtgatgcgcaccctgacagaaccgtagtggtctatgctaacacctcggctgctgttaaagcgcgtgcggactgggttgtgacctccagtatcgccgtagaactgattgagcatctggatagtttgggggaaaaaattatctgggcgccggacagacacctggggaattacgtgcaaaaacagaccggggccgatgtactgtgctggcaaggagcgtgtatcgtgcatgacgagtttaaaactcaggcgttgacccgtttaaaaaaaatctatcccgatgccgctcttctggttcaccctgaatcgccgcagtccattgtcgagatggccgatgcggtgggctccaccagtcagcttattaaggcggcaaaaacgctgccgcacagacagcttatcgtggcgaccgatcgcggcatcttctacaaaatgcagcaggcggtgcctgaaaaagaactgcttgaagcgcccacggctggcgagggggcgacctgccgtagctgcgcgcactgtccgtggatggcgatgaatggcctgaaagccattgctgaagggctggagcagggaggcgcggcgcatgaaatacaggttgatgcggcgctacgcgagggcgcattactgccgctcaaccggatgctggattttgcggctacacttcgggcgtaaagacggaaatctttgggggagagaatggatttttttagtacgcacaacatactgattcatattccgattggcgctggcgggtacgatctctcgtggatcgaagcggtaggaaccatcgccggcctgctctgtatttggcttgccagtctggagaagatcagcaactacttttttggactggttaacgttaccctgtttgcgattattttctttcagatccagctttatgccagcctgttgctgcaactctttttctttgccgccaatatttatggctggtatgcgtggtcgcggcaaacaaaggataatcaagccgagcttaaaatccgctggctgccgttgccaaaagcaatggcatggctggcgatatgtgtgatagctatcggtttgatgacgcgatatatcgatcccgtattcgccgtcctgacgcgcgtggccgtcgccattatgcagatgctggggttacaggtgacaatgcccgtactgcaaccggacgctttcccgttctgggactcttgcatgatggtgctgtctatcgtggcgatgattctgatgacacgcaaatatgtcgaaaactggctcctgtgggtgataatcaacgtgatcagtgtggtgatttttgctttgcagggcgtctatgcgatgtcgctggaatatctgatcctgacatttatcgccgtgaacggtagccgcctgtggataaacagcgcgcgggagcgaggatcgcgcgcgctttcccgttaatggtgatgaacatgcccggacgatgtctgattcagatgacagtccgggccgtgacacacttgatactccatctgaatcgtagcgtgcgcaatatggtattcgtgcatcaggaaatcctggatacgttccagcagcgcatcatggtcgtgtggcggaatgacctgagcgtgcaacgtcatgaccggtttttcgccgaccatccagacatgcacatggtgtacgttgcggacttcggggatttcccgacttaaatggcgctgtaaggcattaatatccagtgaaaccggcgcgccttccagcaattcgttgacgctatcttttaacaaacgccaggcgctgcgtagcaccagtaccgaaaccagaatagagagaatcgggtccgctggcgtccagcctgtccagataatgatcaacgcggcgactattgcgccgacggaacccagcaaatcgcccatcacatgtagcgcggcagcgcgcacgttcaggtttttttcatcgcttccccgatggagaatccagaacgcaaacaggttcgccagcagacccgcaaccgcaatcaccatcatcagattgcccgccaccggacgtggcgtgtaaaagcgctctatcgcttcccagacaatgagaagggtaatgaccaccaacgcaatggcattcacaaaggccgccagtgtggtgagtcttagccagccaaaagtgtggcgaacagtcgggggacgacgggaaaattgaaccgccagcagcgcaaagagaagggccgccgcgtcggtgagcatatgtcccgcatccgccaacaacgccagagagccggagagtatcccgcccaccacctcaaggagcataaatccggcagtgacgataaaggcgaaaagcaggcgacgagcattattatctttcggcaggtgtgaatcggcatgagagtgtgagtgcgccataacgtcattcctttgttattctcatcaatactgtagacatcatactgatttttcgctgacaaaataaaaaggagagcgaaagctctcccgttatcagacttttttttgcattactgtgtggtaccgtcggttttggtattcacgtcattattgacgccattaccggtttccacttttttattaatatccgggcagcgaccgtctttacacatggtatttttatgctcttcatccttggtcattccgtcatgattcatggttgaaccgtctggatgctgcatcgtgctgttagtattgccgttggtattgatgtcgttgttattcacatcattcggcgctacattctggcgggcgtccggggcaacctgaccggcatttgccgccgagttcgcctggccattactggattgcgcgttagattcagcagctaacgctgcgccgctggcaaggccgagggtagcggtcagtaaaagcgtagtcagttttgtcattttcataagatgctcctgttatggtggatatgtcggataacctcttccaacagtgcacgtgtcagtcaaatcctcaaataagggataaaaagcgttcgccgccgcgggttaacgcagcagagaatcttgcaataattcataaacagagtggttacagttaaaaagtgtagattagatcccatttttcgctacatttgtgcgtttttttcctgaattccaggattattccgttcaaagtgtaaaagcccgtttacactatttaattgaagagatagattggagggattgcattcattgggataagtacggcaacactggaataaacatgaattatcagaacgacgatttacgcattaaagaaatcaacgagttattacctccggtcgcgctgctggaaaagtttcccgccacggaaaatgcagcaaataccgttgctcacgcgcgcaaagccatccataaaattctcaaaggcaatgacgatcgtctgctggtggtgatcggtccttgttcaattcatgatccggcagcggcgaaagagtatgccgcccgtttgctggcgctacgcgatgagcttcaaggcgagcttgaaattgtcatgcgcgtctattttgagaaaccgcgtaccaccgtcggctggaaagggctgattaacgatccgcacatggataacagcttccagattaacgacggtctgcgtattgcgcgcaaactgctgctggatattaacgacagcggcctgcctgccgccggcgaattcctcgatatgatcacgccgcaatatctggccgatctgatgagctggggcgccattggcgcgcggactactgaatcccaggttcatcgcgaattggcgtctggcctctcttgtccggtcggttttaaaaatggtactgatggcacgattaaagtcgccattgacgccatcaacgccgccggcgcgccgcattgcttcctctccgtcactaaatggggtcattcggcgattgtgaataccagcggcaacggcgactgccatatcattctgcgcggcggtaaagcgccaaactatagcgcgcagcatgttgctgaggtgaaagaaggcctcaccaaagcgggactgacgccgcaggtcatgatcgatttcagccatgccaactcctgtaagcaatttcaaaagcagatggaggtttgcgccgatgtctgccagcagatagcgggcggtgaaaaagcgattattggcgtgatggtagagagtcatctggtagaaggaaaccagagtctggaaagcggtcagccgctgacctacggtaaaagcattactgacgcctgtattggctgggaagataccgatgcgctgcttcgtcagttgtcggcagcggtaaaagcccgtcgcggctaagtttagtttctatcctgtagtgaagtgcaggatagaaaacatattggtccggtaacagcctaccggaccggtattaccaatattaatgtattattatttggcgtacttaggtacttcctgcttctggagagtatttccttccgaatcaattcctacaatgagtctatagcggtcaaaatataacttcttaatggattctgttcctaattcttcgtaggcaacaatttctactgatttaacatgttttgtattaattgcagacgctcctccaatcccgagtagcgaaaccccaccgtattttttacaaagctcagcgacataatcagcacgatcgcctttgccaagaaacgcagttgccccttgttgaaacatcatttctacaaatgggtccatacgcgcggccgttgtaggaccgttggagccaataggtaaaccaggtctggcagggcaggggccagcatagtaaattgtttggttttgaaaatcgactggtgatttttctccgttactaagcgctacttcgatttttttatgcgcggcgtcacggcaggtgtaagcaaatccagtgagaaataatatatcgccgaccttaagagttttcgctttctctttagtcaatggtaatgttaattccatcatagcttctccaggtattaaatgatttcactagcgtggcggcttgcattacattggaaattgattgcgactggcagtgcagtgatatggcaaggatagtaatcgacatgcacgcctaacgccgtaatacgcccgcccatacctaaagggccgatccctgtattattcacggcctctaataattcagcttcgagctgggcataaagtggtttagcattgaactcaccaagagggcgtaataatgctttcttcgccatccacgaacagtgatccattgtaccgccaacgccgataccaataatataaggagggcatggattgcctcctacacgacggacagtttccagaacaaaatcttttataccatcaataccatcgccgggaagcaatgttttaaaagttcccatattttcgctaccgccgccctttggcataacggtaattgtcactcggtcaccatcaacaatttcagtatgtaaaattgcaggagtattatcattagtattaatacgttctaatggatctgcaaccatggattttcttaagtatccattttcatagccctggcgaacaccctggttcacctgatctttaagcggcttaccttcccagcatacatgttgtccaatttccattataacgatacaagtgccggtatcatggcagcatgcaagttgttctttttttgcatactctccattatcaattaatatcttaatggtttccttgccgatctttgactcttctttatcatatgctttacgaaaagaacacatgagattatcatccagttcataacaagctttttttacaagtttttcgataatcggaatgataatttctgtatttaatatacgactcatactccctccagtgctatgttgcattgttttatccattgatcacattttcatgatattcgtattcattgtaggaaggaaatatgttatttttattaaatgataaattttatttatagtagtggaaaatagatggaaattagacaattagaatattttgtaagcgcttctttgttaggtaacttaaccagagttgctgagcggcattttgtttctcaacctaatatcaccattgctattaagaagttagagactgaattaggggtgacattatttgatagaaagaaaaataaacttgtccttactgaggagggcatgtttttcttacaaaaaattgaacctatccttattgcgttaaaaaatagcgtagcggaaatgaaagattatcgtaatgaaaatggtggcatagtaactttggggatcccaccgatgataagtttgtttcttttttcaccgctcttcaagcatttccgagagatttatccagagatggaactctctcttgttgaagaggggacttttggtttacatgataaactttctgctggagagctggatcttgctattgttattattaatgactgtccaaaagaattagttacggtaccattaatgactcagcagcacgtggtatgtatgtcagataaacatcctctggcaaaaaaggatagtatcgattgggaagatctacaatatgagccattgatactaatgaaaaaagattcctggcatagaaaaacgattattgaagaatgtacaaagcgaggaattcatacacatatttttctatcatcaaacagggttcaaaccaacatagatctggttgctaaaaatgaaggaatttctttcattttggacgctgtcgatcttaaagccgaaaaagtaataaccaaggccatgactgagctgacttatgttacgattggtttggcctggaagaaagataaatatttatcatatgcaaccagagcgttaattaaattcattgaggattatattaaagaacattttacaattaaataattatatttgttcttcaacaaaaatttcccatagctcttcggcatctggaggcattctcttggctggtctataaagtcttatttctatgggtacccataaattactttctttttccgctgcagtaacaatagttttagcctctatatcttgcctggcaaggctttgaggtatccaggcaacaccatcgccagatctgaccattgccaatagtgttgctgccagatcggccacaaaggcaacatttatattatgggtaattctgttaatagacgctgtatttgctattattcttcccagacctgattgtgatgaaaaagaaaggtaagggaattgaatcttattatttatattccacaacggttttaacgtttctgagtctggtttactgaatggaattaatgtatcaaacccaagacgaatgctcataaagttatttttatttaaatttagatgcatatgtgggtgatggtgacacagcaaaaattgtgaatctccctgccgcatcattttttcgcacgcattcaatgagtcagataaaagacgaaatgaaccaaattttgcaattttatcactctgttttaacaaatgcggtacaaaagagaaagacaaagcatgcgttgctgaaaaaacaagactgggttgtttattacctgcggcctcaagggtatcacttttcaatgtgtacaaggagtggatcagttcgggaagctggtctgtaaatacttctccggccttggtaagggtgactccccgtttacttctttcaaaaaggggcgtacccacccattcttcgagagattgtatccgacgactaaatgcgggttgagtcacatatcttgaggcagacgcttttgagaaattcaacgtttcttttagagccagacagtcttcgagccatgttagttcgaggtgatgccgatattgcataagctgcaaccttattagcattggatgagtttcatttatataagtagcattatacacagacagattttaagaggaaattatttgattaaacagaaacaaaagcagtaagaatatgttatgcctttgtcgggtaagtgttgttatttatgtgagtgtattctttctcaatagaaattaattagatgtaattttagtataacatgtgatttatgcttgttgcagttgtattcatgactgtaatgagttgtttttgtaccctaataatataaggacgtatacatgtcaccagcgattattactttgttggttttagtggttgcaataattatctttgttagcgatcgtcttcctatgggattagttgcatttatggtcccaatggcactttattttaccggtgttatcgatgctaaggatatttttgcttcaatcgtaaatgcgaatgttattcttatcgtcgccatgtgtgtactcggtgcggcattttttaaaacaggtttggcatggcaatcaagtaaaattttactaaaatatgctaaaacagaaagaagccttagtgtattgatttttcttattggtggagttatgtctgcctttgtttctaatagcggaacagttgctgtgctaattcctattgttttaggtattgccgccagtagtcagattaagcctattaaacttcttatgcctctggtttttggggcaacaatcggtgctgatatttctattatcggttcgccaggaaatctgattgctaaaaatactattgaaacttttagtaagggaagtctgtcggtgccatttttcgaatacgctaaaattggtattcctttgctgattgcatgctctatatttctctatttcttcggttcaaaactcatcgcagatcgtgatggaaatacacaatctgattctcaaatggattatagccaaattccggcctggcatagaaatttaactttagccgtttttattctgtctatcgctggaatggtggcaactgattatattaagtttctgcctccaatgcatattattgcgtgttgtgcggctattgttcttgtatttgctggcgttttgacacaaaaggaaacttttaattcttttgaaacactaactgttttcatgcttgcgtttatgatgcctttaggagccgcgcttaattctactggtgctggagaaatgattgctaatgccgttatttcagtaaccggagattctggcgttatgattattatggcgtcattgtggatacttacatgggctttgactcaagttatgagtaacactgcagcatgtacgttgttatgcccggtaggatggactatcgcacagtctattggcgcagaccctcgtgcagttgttattgctgtttttattgcgagtagtgttgctgtttgtaccccaatggctattccagcaaactcaatgattattggcccggggaatgttaaatttaaagattttttaaaacccggattggcgattagtttggtttgttttatcgttagtatgattttactaccgatattttatcccttctattaatgcctgatattacttttctattttagattattaaatttgagactttattatgaatagttcggtgctattaggtgaaggcttcaccctgatgttcctcggcatggggttcgtgctggcgtttctgttcctgctgattttcgccatccgcggcatgtccgccgccgtcaaccgcttcttccctgaaccggtcccggtaccgaaggcggcacccgccgccgcgcccgcggacgacttcgcccgcttaaagccggtgattgccgccgctatccaccaccatcgccgccttaacccttaattcacggaggaatccatgaccgttgccattaccgatgtcgtcctgcgcgacgcccaccagtccctgttcgccacccgcctgcgccttgacgatatgctgccgattgccgctcagctcgacgacgtgggctacggctccctcgaatgctggggcggcgccacctttgacgcctgcatccgctttctcggcgaggacccgtggctgcgcctgcgcgagctcaaaaaagccatgccgaagactcccctgcagatgctgctgcgcggccagaacctgctcggctatcgccactacgccgatgacgtggtggaacgcttcgtcgaacgcgccgtcaaaaacggcatggacgtgttccgcgtcttcgatgccatgaacgacccgcgcaatatgaaagccgccctgcaggcggtgcgcagccacggcgcacacgcccagggcacgctctcctacaccaccagcccggcgcacaccctgcagacctggctggatttaacggagcaactgctggaaaccggcgttgactcgattgccatcaaggatatgtccggcattcttacaccgatggcggcgtatgagctggtcagcgaaatcaaaaaacgttttgaggtacgcctgcacctgcactgtcatgccaccaccggcatggcggagatgacgctgctgaaagccattgaagcgggcgtcgacggcgtggacacggcgatttcctccatgagcgccacctacggccacccggccaccgaagcgctggtggcgacgttggcaggtactgagcacgacaccgggctggatatcctgaagctggaaaatatcgccgcctacttccgcgaggtgcgcaaaaaataccacgcctttgaaggccagctgaagggctacgacagccgcattctggtggcgcaggtaccgggcgggatgctgaccaacctggaaagccagctgaagcagcagaacgcggcggacaaactcgaccaggtgctggcggaaatcccccgcgtgcgcgaggacctcggctttatcccgctggtgacccccacctcgcagattgtcggcacccaggcggtgctcaacgtgctgacgggcgaacgctacaagaccattgccaaagaaacggccggcattctgaaaggcgaatacggccacacgccggtgccggtgaacgccgcgttacaggcccgcgtgctggaagggggcgctccggtgacctgccgcccggcggatttactcaaaccggagctggctgaactggaagcggacgtcaggcgtcaggcgcaggagaagggcattactctggcgggaaacgccattgacgacgtgctcaccgtggcgctgttcccgcagattggcctcaaattccttgagaaccgccacaacccggcggcgtttgagccactgccgcaggcggaagccgcgcagccggtggcaaaagcagagaagcctgcagcttccggtatctacaccgtggaagtggaaggcaaagcctttgtggtgaaggtcagcgacggcggcgatatcagccagctcactgcggctgttccggcggcctcttccgcaccggttcaggctgccgccccggcaggcgccggcaccccggtcaccgcgccgctggcggggaatatctggaaggtgattgccaccgagggccagacggtggccgaaggcgacgtgctgctgattctggaagccatgaagatggaaaccgaaatccgcgccgcgcaggccgggacggtacgcggtatcgcggtgaagtccggggacgcggtctccgtcggcgacaccctgatgacgctggcgtaacggagaactgaaatggaaagtctgaacgccctgcttcagggcatggggctgatgcaccttggcgcaggccaggccatcatgctgctggtgagcctgctgctgctgtggctggcgattgcgaagaagttcgagccgttactgctgctgccaattggcttcggcgggctgctctccaacatcccggaagcgggtatggcgctgaccgcgctggaaagcctgctggcgcaccacgacgccgggcaactggcggtgattgccgcgaagctgaactgcgcgccggacgtgcatgccattaaagaggcgttagcgctggcgctaccgtcggtgcagggccagatggagaacctggcggtggacatgggctacacgcctggcgtactggcgctgttctacaaagtggcgattggttccggtgtcgcgccgctggtcatcttcatgggcgtcggcgcgatgaccgacttcggcccgctgctggccaacccgcgcaccctgctgctgggggcggcggcgcagttcggtatcttcgccacggtgctcggggcgctgacgctgaactacttcggccttatcagcttcaccctgccgcaggcggcggccatcggcattatcggcggcgcggacggcccgacggcgatttacctgtcgggcaagctggcgccggagctgctgggggccatcgcggtggcggcgtactcgtatatggcgctggtgccgttaatccagccgccgattatgaaggcgctgaccacggagacggagcggaaaatccgcatggtgcagctgcgcacggtgagtaagcgggaaaaaatcctctttccggtggtgctgttactactggtggcgctgctgctgccggacgccgcgccgctgctggggatgttctgctttggcaatctgatgcgcgaaagcggcgtggtggagcgcctgagcgacacggtacagaacgggctgattaatatcgtcaccatcttcctcgggctgtcggtgggcgcgaagctggtggcggacaagttcctgcaaccgcagacgctgggcattctgctgctgggggtgattgcgtttggtatcgggacggcggccggggtactgatggcgaagctgctgaacctgtgcagtaagaacaaaatcaacccgcttatcggttcggcgggggtgtcggcggtgccgatggcggcccgcgtatcgaacaaggtgggcctggagtcggacccgcagaactttctgctgatgcacgcgatgggcccgaacgtggccggggtgattggctcggcgatagccgccggggtgatgctgaagtacgtgctggcgatgtaaatctgttcctttcccggaggcggcgcgttgcgcctgtccgggctaccggattgcatggatctgtagcccggacagatgcgcagcatcgtctccgggaatgtcccataaggagactttgatgaatgaaaccatagcatttcgtccggaaggccgggcatcgataaaagatgtggttgtcaattatacgctggcatcactggacgagcttgaacaactgcacccggcgctgaatctgctggcgcacccgtcaattgtccgtggcagccatgatttctttgtccgttgttatgacgcgggcgtacagcatgcgcaggccggggcggctgaaacggtagcggttttgcctgattcgctgccacaagaacggcaaaggagcgggctgctgtgtgccgcagcaggtcgtctggatgccctgcgccagccgctgacgcacaatcgtttatgtgacctggccagtcagttctgtgctggcatggcagatgttgacagcgaaacccgcagcggtttttataccgtgcgcagcatatcgctgccggtttaccggcggctgttgcgggatcaacattctcacggtgtctgcctgcagcaggctctgctgcacctgctggcctggaagagcgattctccctgggcgcggcagcaggcgcagcggctgctctggcagggcggcgtgctgggcgataaaggtgagtttgcgcttatgacgctggatgatgaactgcgggagcgccagattgggtggcccgggctgtggtcgctgctggccgtcaccgggtttctggcgaaattccctgccggaccgatatttgctgactgaaaaatgaggactgctgacaattatctgttgtgttggcatttctgcgagaggcagctagcgctttgcctgacttacgaaacgagaatatcaacagattacgtactttttgtaggtccgtggttggaacattgccacctggttacacgttgtcagcagcctcaagcgtggatggctccacgctgtctttgtctatggaaaacccccagtcaggccctgtctcttgatcaggagatctgatcaagagacagggctatgccggaggatatttattggaaaccgatgagataggccaccgtgtcattaatcgaaatataaataaatatataacgaaataattcggcgctataattctcctctgattaataacgtagcccgaaccatgacctgtcaggacaaatcacttttagcccccgctctcgcttccacgcccgtcattccgcgctatcgccagatcatacgcaaacgggctgtgctcatgttagctattgcgttggcgatgatggcttcactgatggtggatgtaacctgtgggtcttctggtttaccgctcagtgcgctatggcaggcgctttttcaaccggaaaaagtgaatgcgggcatacacgttattgtctgggatattcgtttaccctatgccctgatggccctactggtgggcatggcgttagggttagcgggcgccgaaatgcaaaccattttaaataatccgctggcgacgccgtttaccctcggcgtatcgtccgcggcggcttttggcgctgcgctggcgattgtgttggggatcggtattcccggtattcctgccgcctggtttatcccggccaatgcgttcatctttgcgctgttatccgcgttactcctggacggtattacccgttggacaggcgtcgccgcatccggagtggtgttgtttggtattgcgctggtattcacctttaacgcgttggtcgccattatgcagtttgtggctgatgaagatacgctgcaggggctggtattctggacgatggggagcctggtccgcgcgtcgtgggaaaaattgggcgtactggccgtggtgtttattgctgtgcttttttgcgcgttacgaagcgcctggcaactcacggcattacgtctgggcgaagagagggcgatgagctttgggattcatgtccgccgtttacgcctgctgtcattgttgcgtatcagcttgttatcagcgctggcggtagctttcgtcgggccgattggttttattggtctcgttgcgccgcacattgcgcgaatacttttgggggaagatcaccgtttctaccttccgggcagcgtgctgataggcgggctggtgttatcgctggcctctattgcggcgaaaaatagtattccgggcgtcatggtgccggtggggattgtcacctcgctggtcggggttccgttctttttaagcattgtattgcgacatcgggggagtctctgatgcgcgggttaatgctccgctcatttagcgccggctattccactcagccggttattgcagatctcaacgttcccttactgccgcgcgggaaaattaccattttgctggggccgaacggctgtggtaaatcgacgttactacgttcgctggccgggctgaataacgccgacggcgaggcgctgcttgatggcgaagatctcatgtcgttatcgtttgccgagcgggcgcagaaagttgtgtttttgccgcagtcattaccgcagggcgtacatctgcatgtactggagtcgattatcgtggtactgcgggcatcaggcggcagagacaatgcgcagggcagagcgcagatactggctatccttgagcaattgggcataacgcatctggcgttgcagtatctcgaccagctttccggcggtcagcggcagttagtgggtctggcgcaatcgctgattcgtcgccctgaacttctgttgctggatgagccgctcagcgcgctggatttaaactatcagtttcacgtaatggatctcgtgcgtcgggatacccaggcgcaaaatagggtaacgatagtcgtggcgcatgacattaatattgcactgcgtcatggtgaccatgtcctgatgctaaaagacggcaggctggtcgccagcggcgcgccggagacggtgattactgcggagcgtctggctgaagtgtaccgggtacgaggacgcgtggagcgctgttcgcaggggaaattgcaggtggtgctggacggcgtgatcgctgtttaagacatattgcctgatggcgctgcgcttatccggcctacccattgctcgtaggccggataaggcagttataccgccatccggcaaaggtgattacttcgctttaccctgattcgccacggcagccgctttcgcggcgatttcgtcagcgttgcccagatagtaatgtttgagcggcttgaagttttcgtcgaactcatacaccagcggcacgccggtcgggatgtttaactcaaggatctcatcttcactcatgttatccaggtatttcaccagcgcacgcaatgagttaccgtgagcggcgatgatcacgcgctcaccgctcttcatacgcggcaggatggtgtcgttccagtaaggaataacgcggtcgatggtcagcgccagactttcggtcaacggcagctctttctcgctcagtttggcataacgtggatcgtgacccggataacgctcatcatctttggtcagttccggcggcgtcacggcaaaaccgcggcgccactgtttaacctgctcgtcaccatatttttctgccgtttccgctttattcagcccctgcaacgcgccatagtgacgttcattgagtttccaggatttttccaccggcagccacgcctgatccagttcatccagtacgttccacagcgtatggatagcgcgtttcagtacggaagtgtaggcaaaatcaaagctgaaaccttcttcttttagcagtttacccgctgcttttgcttcgcttacgcctttttcagacaggtcaacatcataccagccggtgaaacggttctctttgttccattgactttcaccgtgacgtaccagaaccagcttagttacagccatactctcactcctataaatcatatgtaatgataataattctcattatattgccgcgaggtgttggcggcaatgcttacgcataaccatagcgaaaatagtggcgcagtgtaaggttcttgtgaattcagagttgcgattttgtctttaagtggtggaggtttgagcagggcaatggcgcgtaggcccgataagcttgcgtcatcgggcatgtagcggcatatcgttagaacggaataaactgatactcggtcaggctggcgtactcctcgccagggcgaaggatacagtcaggctgcggccattcaggatgattcggactgtccggcagcagttcgctttccagcgccagcccttgccagtcggcataaggttccggcccgcgggaaggtgtacccgccagataattgccggaataaaactgtagcgccggggcggtggtgtaaaccatcatttgtagctttccatcctgtgaccacagacgggccgccggctttttgccatcaccctgcgtctgtagcaggaaagcatgatcgtagcctttaaccttgcgctgatcgtcatcggcgagaaattcactggcaatgacttttggcatccggaagtcaaacgaggtattggctaccgattttagcccctggcgtggaataccggattcatctaccggcagatactcatccgccagaatttgcagcttatgctggcgcacgtcggtccgatcgccgtccagattaaaatagacgtggttggtcaaattcaccggacagggtttatcgaccgttgcccggtaggtgatggagattctattgtcatcggtcagacgatattgcgccgtggcgcaaagatggccgggaaaaccctggtcgccgtcatcagaggtgagcgcgaataatacctggcgatcgttctggttcacaatttgccagcggcgcttgtcaaagccttccggtccgccgtgtagctggttctcgccctgacttgggcttaactgtacggtttcgccggcaaacgtatagcggctattggcgatacggttcgcgtaacggccaatagaggcgccgaggaatgacgtctgttcagggtagtgttccgggctggcgcagcccagcaatgcttcccgaacgctgccgtcagacagcggaatacgggcggaaagaagagtggctccccagtccatcagcgttaccaccatccctgcgctgttgcgcagggttagcaggcggtacggttgaccatcgggggccagtgcgggcgtttcatttagcactgtcctgctccttgtgacggtttgcatacataaaaggtttctttgattccggttttcgcttcgtactgttgcgcaacggcctgccgaacagcgggaaccagatcttccgggatcagtgcgacaacacacccgccaaagccgccgccggtcatgcgcacgccgcctcgatcgccgatggtcgctttgacgatgtctaccagcgtgtctatctgcgggacggtaatttcgaaatcatcgcgcattgaggcatgggactccgccatcagttggcccatacgttgcaaatcacctttctccagcgcgcttgccgcttcaacggtgcgcgcattttcgctcaatacatggcgaacgcgttttgcgactaccgggtccagttcgctggcaacggcattgaacgcctcaaggctgacatcgcgcagggccggctgctggaagaaacgggcgccggtttcgcactgttcacggcgggtattatactcgctgcccaccagcgtgcgcttaaagttactgttgatgatcaccacggcgacacctttcggcatggaaaccgctttggcgccgagcgtacggcaatcaatcagcagcgcatgatcttttttgccgagcgcagagatgagctgatccataatgccgcagttacagccgacaaactggttctcggcctcttgtccgttgagcgcaatttgcgcgccgtccagcggcaggtgataaagctgctggaagacggtgcccaccgccacttccagcgaggcggaggagcttaacccggcgccctgcggcacattgccgctgatgaccatatccacgccgccaaacgcgttgttacgctgctgcaggtgtttcactacgccgcgcacatagttagaccactgctggctatcgtgggtcacgatcggcgcatccagtgaaaattcgtccacctgattgtcgtaatcggcggcaatcacccgtacggtacgatcgtcgcgcggcgcacagctaattacggtctggtaatcgatagcgcagggcagaacaaaaccatcattgtaatcagtgtgctcgccgatcagattgacgcggcctggcgcctgaatcgtgtgggtagcagggtagccgaaaatttcagcaaacagcgcgcgcgttttctctttcagattcatttttatactccggattcgcgaaaatggatgtcgctgaccgcgcgcaggcgttcagccgcttgttctgcggttaaatcacgctgggtttccgccagcatttcatagccgaccataaatttacggacggtcgcagagcgcagcagcggcgggtaaaagtgtgcgtgcaactgccagtgtgcgttttcttcaccgttaaacggcgcgccgtgccagcccattgagtaggggaaggaacactgaaacaggttgtcataacgactggtcagctttttcaacgccagcgccagagagtcgcgctgctcgtcgcttaaatcggtaatgcgcaggacatgcgttttgggtaacagtagcgtttcgaacggccacgccgcccagtaaggcaccaccgccagccagtgttcggtttcgaccacggtgcggctgccgtccgccagttctcgctggacataatccaccagcattggcgagcgctgctcggcgaagtaggctttttgtaaacgatcttcgcgttcggcctcattcggcaggaagctgttggcccagacctgtccatgcggatgcgggttcgaacagcccatcgccgcgcctttattttcaaagacctgcacccacggataggttttgcctaactcggcggtctgcgtctgccaggttctgacgatttccgtcagcgcgggcaggctcaactccggcagcgttttactgtgatcgggagaaaagcagatcacgcggctggtgccgcgcgcgctctgacagcgcatcagcggatcgtggctgtccggcgcatccggcgtgtcggccatcagcgccgcgaaatcgttagtaaagacgtaagtccctttgtaatcgggatttttatcgccggtgacacgcgtattgcccgcacacaagaagcagtccggatcgtgggccggcagcatttgctgagacggcgtttcctgcgccccctgccaggggcgttttgcgcgatgcggcgaaaccagaacccactggccggtaagcgggttataacggcgatgcggatgatcgatgggattaaatggggtcataacaacgtccttaatctgggtatccctgcggatggcgtgactgccagtgccaggtgtcctgcgccatttcgtcaagcgtgcgggtgacgcgccagttcagctcgcgatcggctttgctggcatccgcccaatacgccgggagatcgccgtcgcggcgcggcgcgaagtggtaattaatgggtttaccgcaggctttactaaaggcgttgaccacatccaggacgctactgccgacacccgcgccgaggttataaatatgtacgccggatttgtccgccagtttttccattgccacgacgtgcccgtcggctaagtccataacgtgaatgtaatcgcgtacgccggtgccatcctcggtcgggtaatcattgccgaaaacggcgagcgattcgcgacgacccacggcgacctgggcgatatagggcatcaggttattcggaataccttgcggatcttctcccatgtcgcccgacgggtgcgcgccgaccgggttgaaataacgcagcagcgcaatactccactccggctgggctttttgcagatcggtgaggatctgttctaccatcaatttacttttgccgtaggggctttgcggcgtgccggtaggaaaactttcgacgtaagggatcttgggctgatcgccataaacggtggcagaggagctaaaaataaggtttttaacgttggccgcacgcatggcgctgaccaaccgtagcgtaccgttgacgttgttgtcatagtactccagcggcctggcgaccgattcgccgacggctttcaggccggcaaagtgaatcacggtatcaatcgcgtgatcgtgcagaatttcggttataagcgcttcgttgcgaatatcgccttcgacaaaggtcgggtgcttaccgcccagacgttcaatcacgggcagcacgctgcgcttgctgttgcagaggttatcgaggatgacgacgtcatgaccattttgcagcaactgtacgcaggtatgacttccaatgtaaccgctaccacctgtaaccaatactctcataattcgctccgttaagcctatggtatggaataaccatagcataacaaagatgcgaaaagtgtgacatgtaataaattagtggaatcgtttacacactggtgattttacgcatttgtatcgattaaatgattacaaatcatctggcttgagaatgcttctgctttttatccgaaaaaaaggcgcgttacgcgcctgggaatgaaacggacggggcaagagctgtcagtcttttttacgcgagagtagcttcctggcgagcgccccgacagcgacgacgccgatggcggtcactttccagaatttaagcaacgcgataccgagcatagcaagcagtcctactttcttggccgcgataccgccaatcagcgcggcgagcccatactccgctattttgtccgttgattcgttgaagtcagcgtagcgttgtccagcgttgaacttgacggaactgagaattcttttcgccagagggatttcgtggtcaacagaacctctgtcggtcaccagatttaaagaaaaatagccttcacgtcccagcagataggtgttgtagttcacgccttgttcattcagtggttcgttggtgccgatatcctggatggcggcggaccagatcagacgatgattggttgcatcgtaggtaggcttctcgatccagccaataatttctatcggctcaatgccttttgcaatacgatctttattcgcttcttttgtgcctttgcgcaggttatccattaattcatcggcatcccagttttttgcatcatcatcttttacataaccagaatcatcatattcgatagaaataaatccattcatttcctttttaaatacgaggccgtaaaaatattcatcgtcaacatagttaccaatttcacgcataaataccgccgcttcttttgcgggtatccaggtaaatccttccggcagattaagcgtggctttatcacctaaactaatctttgtcggacccgcaacggcggcgcgactcatgccttcaacagcgacctcaacagcggttttacgcgcttcctgcgcagcggtcggcttttgctcagcataactgctggggcaaaataaaatagctgccagtaaaaatagtattatttgtggaaaacgaaaagccataatgaatcccttatattcacatacgacatcattgtcgaaaatttcaggattattatgacaatgaggcggtcagcgattcaagagatagtaagcttatcgaccgttattattattcttaataaaaggagagtggttccagaatggcgcgcggcgccattctgataatacatttaattattgcatcgtccggaaacgtacttataacgttcgccctctggtacaaattccagccggtgggtaatacaggcaggcgcatcctctgcatgatgggaaacgaacagcagttgggtctctccctggcgaattaatacatctacaaaacggcgtaccagttggcggttcagcgggtccaacccttgcagcggctcatccagaatcaacactgtcggatgcttaaccagcgcgcgcacgattagcgccagccgctgctgtccccaggagagactgtggaagggggcatccgccgtacgcttatcgattcccagaatatccagccactgttgcgccagttttcgttgcctgtctgaaacggcctggtaaatgccgatagaatcgaaatagccggagagaatgacattgcgtaccgtggtactgacgcggtaatccagatgtaaactgctgctgacgtagccgatatgttttttgatatcccagattgtttcgccgcttcctcgccgccgcccgaacagcgtaagatcgttgctgtagccttgcggatgatcgccagtaataaggctaagcaacgtagacttacccgctccgttaggaccgacgatctgccagtgttcgcccggattgactcgccagcttaagtggtggaggatagggcgatcgttatacgagactactccatcgttaagtacgatccgtggttcgccatcgggtaacgcatggcgggcggaaggttcgtccggttcgggtaattgtacgtcggtcagacgctcgctgtgcgcgagttgagcaaccaacgcccgttgcagcaactccgccgtcgttccggtctccgccagcgtacagtcggcaagcacgccggcaaactgcacgaagtccgggatctcatcaaaacggttgagtaccagcgccagggtcatacccgcctggttcaacgccgtcaggcgttgcgccagttgttgacgggcggtcacgtcaagcccgtcgaacggttcatcaaggatcaataactctggctcagacatcagcgcctgacacagcagcgcttttcgcgtctcgccggtagaaaggtatttaaaacgcctgtcgagtaaagcggaaatgccgaactgctgcgccagtatcgcacagcgggcaggatggtgaacatcatcctgaataatttccgcggtagtgcgcccggtatcgtcttcgccaggactgagcatatcggtgttattacgttgccactcatcgctgaccagcttttgcaattgttcaaaggacagacgagtaatgcgggtaaaccgacactggcgctcgcctgttaataacggcagttcgcccgccagcgcgcgggcgagcgccgacttcccgctcccgttagccccaacgaatgcccagctatcgcccgcattgagcgtcagcgaatccagatgaagtgtttttgtatcgctcagacgaaacgtgccttgcgaaatttgcaacgatgacattttgcatcccattttttgcagcgatgaatgacagggatacgtctttcggcaacggatgtcaatgtgcttagcacaacgttgcaataatcactctgtccgcattaaaccaggcaatcacgtcatcgccttcctttaacgtggcggcatctgaagtcggtatcgtggcgcacagcgtctggccgtccggcagcgccatcaacacttcacactgttccgcgccgcgctcgatatggctgatcgttcccgacaactgattgtcagcggcgcgcgcaacggctgcatcccgggtaatgccaacccacggcgcttttagcaggatcagcacttcttttccctcctccaggccgagacgctcgccgctttgcgccgtcagcgcgactttgagccgcgttttgccgtcggccagcagcacgtcgacatgctgttgcaccagatcgcgatcgcgggcggtaatggtgccgaaccactgatttcgggcgctggtttgcagtgaaaagcgggagatagcggccagcagactgtcaagcggcagggcgtcatcgtcgcttaacacatcgaacgctttttgctgaatttggcccagcaaatcgtaaagctggatcagacgctggccatagcgggttaataccgcgccgccgccgcctttgccgcccgttgcgcgttcaaccagcatatgttcgctaagctggttcatgtcgtttatcgcatcccaggcgctcttatagctgattcccgcgtctttcgcgccctgactaatcgagccggaaagcgcaatgtgtttcagcagagagatacgtcggggatcggcaaaaagcttttgctgaagtttcagggtaagaaggatttcggcctgcataaccagctcctggtaaaaagactattgtgactgaaaagcgcgtcagcgcaaagccgaccgcacaaaaggggagtgcttttctgtgtgatgcggttaaaatacaaaaaggactatatctggagttgcccatgttagagttattaaaaagtctggtattcgccgtcatcatggtaccggtagtgatggccatcatcctcggtctgatttacggtctgggtgaggtgttcaacattttttccggtatcggtcagaaagaccagtccagacagaaccgctgatttccccaaacgcccgctcagtcgggcgtttttgttactcaagatcctgcttttcctgccgatattttctgtgtttaatcgttaatgggtatgaataaccgctgggaaacccctgagattatcgttatattatcgtttacataacgaaacgcacaaggagttacagatggcgcattcctggttacgcctggtcgcaggggcaacattatctttcgtcatcgccggtcatgcgctggcggatgaaggcaagatcaccgtatttgccgccgcgtcgctaacgaacgcgatgcaagacattgcggcagaatataaaaaagagaaaaatgtggatgtggtctcctcattcgcctcctcttcaacgctggtgcgccagatagaagcgggcgcgccggcggatctcttcatctctgctgatcagaaatggatggattacgcagccgataaaaaagcggtggataccacgacgcgcgaaacattgcttggcaatagcctggtggtggtagcgccgaaagccagcgagcagaaaccgtttaccatcgacaacaaaacggactggattcgtctgctgaacggcggacgtctggcggtgggcgatccgcaacacgtaccggcgggaatttatgccaaagaagcgctgcaaaagttgggcgcatggcaaacgcttgaaccgaaactggcgccgggcgaggatgtgcgcggcgcgttggcgctggtcgaacgtaacgaagcgcctttgggcattgtatacggttctgatgcggtcgccagcaagggggtcaacgtggtggcgacgttcccggaagattcacataaaaaagtggaataccccatcgctatcgtggaggggcataaaaatgcgaccgtcagcgcgttctatgattacctgaaaggaccgcaggcctcggcaatctttaaacgttatggatttacgacgaagtaatgatactgaccgatccagaatggcaggctgtccttcttagcctgaaagtgtcttccctggccgtgctgtttagcctgccgtttgggatcttttttgcctggttactggtgcgatgccggtttccgggcaaagccttacttgatagcgtcctgcatctgccgctggtgctgccgccggtggtggtcggctatctgctgctggtgtcgatggggcgacgcggatttattggccagtggctgtatgactggttcggtctcacgtttgcctttagctggcgcggcgccgtgctggcggcggcggtgatgtccttcccgctgatggtgcgggccattcggctggcgctggagggggtggatatcaagctcgaacaggccgccagaacgctgggcgccgggcgctggcgcgtttttctgactatcaccttaccgcttaccctgccaggcattattgtcggtacggtgctggcgtttgcccgttcgcttggcgaatttggcgcgaccattacctttgtttccaatattccgggcgaaacccgcaccataccttccgccatgtataccttgatccagacgccgggcggggagagcgcggcggcgaggctgtgcgtgatttcgattgtattagcgctgatttcgctgttgatttctgaatggctggcgcggattagccgtgaacggacggggcgctaaccatgctggagcttaatttttcccagacgctgggaacgcactgtttaaccctcaacgaaacgctgccagccagtgggatcacggctatctttggcgtctccggcgcgggaaaaacctcgctgattaatgccatcagcggtttgactcgcccgcaaaaaggacgcatcgcgctgaatggccgggtgttgcatgacgcggaaaacggtatctgtttaacgccggaaaagcgccgcatcggttatgttttccaggatgcgcgcctgttcccccattacaaagtacgcggcaatttgcgctacggcatggcgaaaagcatgaccggtcagtttgataagctggtgtcgctgctgggaattgaagcgttgcttgatcgcctgccggggagcttgtccggcggagaaaaacagcgcgtagcgataggccgggcattgctcaccgccccggagttgctgctgttggacgaaccgttggcctcgctggatatcccgcgtaaacgcgaattactgccgtacctgcaacggctggcgcgggaaatcaatattcccatgctgtatgtcagccattctctcgatgaaattctccacctggcggataaagtcatggtgctggaggatggacaggttaaagcgtttggcccgctggaagaagtctggggaagcagcgttatgcacccgtggctgccgaaagagcaacagagcagtattctgaaagtcagcgtgctggagcatcacccgcattatgccatgaccgccctggcgcttggcgaccagcacctgtgggtaaataaactcaatcagccgctgcaatccacactgcgtattcgtatacaggcgtcggatgtctcgctggtactacagccgccgcagcagaccagtatccgcaacgtattgcgggcaaaagtggcgaattgttatgacgataacgggcaggtggaagtccagcttgagataggcggcagaacgctgtgggcgcgaataagcccgtgggccagggatgagctgaatatcaagcctggcctgtggctttacgcgcaggtgaaaagcgtttctatcaccgcctgactatagcaggtgggtgtaaataaatttggcgatgctatcggtagtgttatcgccgatcacaacgtcagcgcgcgctttcaccgcctcatcggcgttgcccatcgcaacgccggtgcctgccgcctccagcatactgatgtcgttgtagttatcgccgaaagcgatcacatttttcattgaccctccctgcgcttctatccactgggtaaggcgcttgcctttactgttgcctttgcgcgcgatatccacctgatcgtgccatgaccattcgcactccaggccaagcgcctgttcaacatgctgaccgaaccgctgtagtctgggaatatcttcatcggtaagcgcaaacttccacacggcattcacgtcgcgcgccgcctgcgctaacgaagagacctgtgtaaaggtcggacgttgttccggcggcaaggtctgcgcccaccgggaggtacgcacgacgtggccggttgggtgttcgtaaagcatagcgtcatcaacatacatcaggccgtgaatctgatgctcatccagtaaatcaatcaactgcaacgccttatccacgggcataggatcggcatccaggacagttttagcttgataatcatacaaataggtgccgttgcagcaaatagcaggtgtttccagcgccagcgcctgataaaaaggatgaatagcaacgtgatggcgaccagtgacaatgataagttgaaagcccgcctctttggcgcgtgatagcgcttcaagcgaggaggggagtaaggttttatgcggggttaataatgttccgtctaaatcgagggcaatcacgcgtgcagtcataattttttccagattaagagtaataattccgtctgtcggcatggtacaccgggacggtaagcagacaaaattctgcgtctgaattcagcattcgccgtcaaaagcgactacgttaagctgtgtcctgttattgcagctacatgccatatgcaaaggagtattcatgaaacaaacagtctataccgccagccctgagagtcagcaaattcacgtctggagcctgaaccacgaagggacgctgacgctggtgcaggtcgtggatgtgcccggtcaggttcagccgatggtggtcagtccggataaacgctacctctatgtcggcgtgcgcccggagtttcgtgtcctggcgtatcgtattgcgccggatgatggcgcgctgacgtttgccgccgaatccgccctgccgggtagcccgacccatatttctaccgatcatcatggtcgttttgtctttgtcggatcgtataacgccggtaatgtcagcgtgacgcgcttacaggatggcctgccggttgagctggtggatgtggtggaggggctggacggctgccactcggcaaatattacgccggataaccgtaccctgtgggtgcctgcgctaaaacaggatcgcatttgtctgtttacgctaagcgatgacggccatctggtggcccaggagccggcggaagtaaatacagttgaaggggcaggcccgcgtcatatggtcttccacccgaatcgacaatatgcgtattgcgtcaatgaactgaacagttcggtggatgtctggcagcttaaaaatccgcatggcgagatagagtgcgtgcaaacgctggatatgatgcccgccgatttttccgatacccgctgggcggcggatattcatattacgccggatggacggcatctgtatgcctgtgaccgcaccgccagtctgattaccgtctttagtgtctccgaagatggcagcgtactgagcgttgaaggcttccagccgacggaagcccaaccgcgcggctttaatatcgacaatagcggaaaatacctgattgctgcgggtcaaaaatcacatcatatcgcggtctatgaaattacgggcactcaggggttgctgacggaaaaaggccgttatgccgtcggccaggggccaatgtgggttgtggtgaacgcgtactaaagcgctgtgtgccggatggaggcgggctggagctcatcaaggcgggatgcctgattaatttcaataaacattgcttgcagtaaaaccacgggccgccacatctgctgcggcggcccgtttataagcctgaaccggaacggtgattactgcttaggttccgccactactttactgcctataccgcggttgttgtattcccacatgcggttgtagttagtgtcgttcagattacgctgcacctcgtctttgtcatccacggttcccgtatttccagcaaacggacgtttcgagatgaccgcgtcggcccacggtttggcaacgttgaagccctcgttaatcacgctgtcgcggatcacgacctgaccgttggtgttggcgtcgacatccagcgagcggccaagctgcgcaacgccatcgccggaggcgttaaagcggctgttgatcgccaaaaagccatagtaaatattggacagcgtcgccggggcgaagacgtaggcttcctgctgtgtgcgggagttgacgacctggaagttggtgttatcgaacaccacggcgccgcgtccggaaaccatatccacatcgccttcaatatagctgttcgtcaccagcgtacgtggctggcgatcggtttgcagacggttctgcacgccgctgttggtcacaaagaaggtgttctggcggccaaggatattgaccttgttaatctggactttgtcgccatcggtacgcagcgccaccgccggatggtttccggcatcgacgctgtcgcccagcgtgttctcgatggtcagattttgtagctgcagaccgttattctgcgaccagaacgcggcagaacacattacaccgatcgtcgcggcgtgtttgctttggcagttatcgaacatataccaggcgggtttaccaggcatatatttcccgccgggattcaccgcgcggcgccagtcagcgacactcatttcaccatcaatcgccatcccaattttcacatcgatcggtttttcaccggtcccgtacagggtcagacttcccggcgcggcgggaacatacacggtcccctgatagtcgcccggcataatagcaatgtactggcgtttgttcgtgcgtttaaccattgccgcatcgaccgcggcctgaatcgaggtgtgcgtaacgcctggcgtacctgccggccccaccacaaagtcaggctgtgcgggcagggtaatcggcgacggcgaccacggggcggtattcggcgtcagggaggcaaaatagcgcgccgcaacgaagtttttcgcttcatttgccgacagaattgggcgcgaggcggtgccaggcgcggtttgatcggaagggatctgatcgggtggcgtagagctacaggcgctcagcgtcacgccaaaagccagtgccagcgccagacgggaaaccgataatgtattcacaggttgctccgggcttgaaaaagttaaatgacatccattgaagcctgcttttttatactaagttgaacgaaacgggaaggcgaaaaggtaaaaagttccttttcaggccggaaacacctgtagcatcagatagttttatcacaattaagcaacaactttcgcgctttgagttgacaatccggagcagaaagaaaataaatgtctatacaacccatgacaggcaagagagcgacaggaatgcggcaacttttaccgggcgatactgtctggcgaaacatcaggctggcgacaatggacccgcagcagcaagccctgtacgggctggtggataatcaggcgctgattgtgcgcgaagggcatatttgcgatatcgtgccagagacgcagcttcctgtcagcggggacaatatccatgatatgcagggacgactggtaaccccgggacttatcgattgccacacgcatctggtgtttgccggtaaccgcgccgcagagtgggaacagcggcttaacggcgcgtcataccagcatattagcgctcagggcggcggcattaacgcgacggtatcagcaacccgcgcctgtgcggaggagacgctctacctgctggcgcgcgaacgcatgatgcgccttgccagcgaaggcgttacgctgctggagattaaatccggctatggtctggagctggcgacagaagaaaagctgttgcgcgtcgctgcaaaacttgccgccgaaaacgctatcgacattagccccacgctattggccgctcatgctacgccagcggagtatcgtgacgacccggacggctacatcactctggtctgcgagacgatgattccgcagctctggcaaaaagggttatttgatgcggtagacctcttttgcgagagcgtcggctttaatgtggcgcagagtgagcgcgtattgcagacggcgaaggcgttaggtattcccgttaaaggccatgttgagcagctttcgctgttgggcggcgcgcagttggtgagccgttatcagggcttatcggcggatcatatcgaatatcttgatgaagtgggcgtcgcggcgatgcgtgacggcggtactgtcggcgtattattgcccggcgcgttttattttctgcgcgagacgcagcgcccgccggtagaactgctgcgccgctatcaggtgcctgtcgccgtcgccagcgatttcaatcccggcaccagcccgttttgcagtttgcatctggcgatgaatatggcctgcgtacagtttggtctgacgccggaagaggcatgggcgggcgttacgcgccatgccgctcgcgcgctgggaagacaggcgacgcatgggcagatcagggccggctaccgggcggattttgtggtgtgggatgctgaacagccggtagagatagtgtatgagccggggcgtaaccctttatatcagcgggtatacagaggaaaaatctcatgacgcaatggtatccggcttctccggcgctctggcaggggcgcgatgacagtatagaagcgccggatgcgcggcgtctgtttcagaccgtcacgcgcagcgagaccttttcccccgaaaactggcagcaaaagatcgcgttaatgggatttgcctgcgacgagggggtaaaacgcaatgcagggcgtcccggcgcggcaggcgccccggacgcgttgcgtaaagcgctggcgaatatggccagccaccagggacatgaacggctggtggatttaggcaattgggttgcgccgacgcccgatctggaaggcgcgcagcaggccttgcgcgatgcggtaagccgctgtctgcgggccgggatgcgcacgctggtactgggcggcgggcatgaaaccgcgtttggacacggcgcgggggtgctggacgcgtttgcgcaggaaagcgtagggatcattaatcttgatgcgcatctggatctccgtcagaccgaccgggcaacatccgggacgccgtttcgtcaactggcgcagctatgcgacgcgcagagccgcgcgtttcattatgcctgtttcggcgtgagccgtgcggcgaatacgcaggcgttgtggcgggaagcgcagtggcggaatgttaccgtggtggaggatctggactgccatgacgcgctggcgcagatggcgcagtttatcgacaaggtggataaaatttatctgactatcgatctcgacgtattgcctgtctgggaaatgccggccgtctccgctcccgcagcgctgggcgtgccgctgatacaggttctgcgtttaattgagccggtttgccgcagcggaaaattacaggcggcggatctggttgagtttaatccacgctttgatgaagatggcgcagcggcgcgcgtggcggcgcggcttggctggcaaatcgcgcactggtggcgttaatctgtcatccggaaaacattatccgcataaggaaggcttcacgcatgtattcatcccgctcccgttctgcacctgcgcctttttacgaaacggtgaaacaggacatctgtaaaaaaatagccggcggcgtctggcagccgcacgatcgcattccgtcggaagcagaactggtcgcccagtatggctttagccgaatgaccatcaatcgggcgctgcgtgagctgacggatgaagggtggctggtgcgtttacagggcgtggggacgtttgtcgccgaaccgaaaggccagtccgcgctgtttgaagtccgcagtatcgccgaggagattgccgcccgccgtcatcagcatcgttgtgaggtgctcacgctggagcgcgtgcgggcaaacgccatccaggccagcgctctcaacgtcaatgagagcgatgtcattttccattccatcatggtgcattatgaaaacgatctgccggtacaaattgaagatcgctgcgtgaatgcggatattgccgtggattacctgacgcaggattacagtcagaccacgccgcacgcttatttgtcgcggatcgcgccgctaacggaaggggaacatattgtggaggcggtgcgcgccacggcgcaagagtgcgcgtggttaactatcaaagagcatgagccttgtctgctcattcgtcgtacaacctggtccgcgtcgcggattgtttctcacgcccgcttacttttccccgggtcgcgctaccggctacagggacgatttatctcctgagcggactgctgccggaaaacgtgattgctgacacaatataacaaaattgtatcatttttgttaattctattcttgtgcttacttgtatagacaagtatatgtctgattcttatctgtgggtctgcggcggtgcctgatagtggcgttttagcgttatttggcgatggcagaccgataataatgaggagtcattgctatgcctgaaagcaagtatcgtcagcagactatccgcgcgcccagaggcacggtattaacggcgaaaagctggctgacagaagccccgctgcggatgttaatgaataatctcgatcctgacgtggcggaaaatccgcatgagctggtggtctacggcgggattggtcgcgccgcgcgcaactgggaatgctatgacgctattgttgatgcgctcacccggctggaggcggacgaaacgttgcttattcagtctggcaaaccggtcggcgtatttaaaacgcacgacaacgcgccgcgggtattaatcgccaactccaacctggttccccactgggcgacatgggaacattttaacgaactggatgcgaaagggctggcgatgtacggtcagatgacggccggaagctggatctatatcggcagtcagggaatcgtgcagggaacatacgaaacctttgtcgaggcggggcgtcagcactataacggcacgctggcgggacgctgggtgctgactgctgggctgggcggcatgggcggcgcgcaaccgctagccgcgacgctggccggagcgtgttcgctgacgattgaatgccagcaaagccgtatcgattttcgtctgcgtactcgttacgtggatgagcaggccgccacgctggatgacgcgctggcccgcattacgcgctacacccgcgaggggaaagccgtgtccgtcgccctgtgcgcgaacgcggcggatatcctgccggaactggttaatcgcggcgtgcgcccggacctggtgaccgatcagaccagcgcccacgatccgctacatggctatttaccctccggctggcgctgggaggagtatcagaaaaacgcgcaatccgatccccacgggacgatgcaggcagcgaaacgttccatggcggcgcatgttcgggcgatgctggcgttcagtaaaatgggcgtgccgacctttgactatggcaacaatattcgtcagatggcgaaagagatgggggtggaaaacgcctttgattttccgggatttgtgccagcctatattcgtccgctgttctgccgtggcatcgggccgtttcgctgggtggcgctgtccggcgatccgcaggatatctataaaaccgatgccaaagtcaaagagatagtggctgaggataaacatctgcatcactggctggatatggcgcgcgagcgcattcattttcaggggttaccggcgcgtatctgctgggtaggcctggagtggcggcaaaaactggggctggcgttcaacgaaatggtgcgttgcggcgaggtatccgcgcccattgtgattggccgcgatcacctggattccggctctgtcgccagccctaaccgtgaaaccgaagcgatgcgcgacggttccgacgcggtttccgactggccgctgttaaatgcgttgctgaataccgccagcggggcgacatgggtatcgctccatcatggcggcggggtgggaatggggttttcgcaacacgccggtatggtgattgtctgtgatggcactgacgaggccgccgcgcgtattcgccgcgtgttacacaacgatccggcgacgggcgtcatgcgccatgccgatgccggatatgatctcgcggtggaatgcgctgttgagcaaggtctgaatttaccgatggttgcggcgacgcaggggaaaggctgatatgaacaccatgacactcactccggggcagttaagtctctctcaactgtacgatatctggcgtcatccggtacagcttcggctggacgccagcgccattgacggcattaacgccagcgtcgcgtgcgtcaatgatatcgttgccgaagggcgtaccgcctacggcatcaacaccggtttcggcctgctggcgcagacgcgcatcgctgatgaagacttgcaaaatctacagcgatcgttggtgctgtctcacgccgcgggcgtaggcgacccactggatgacgcgatggtgcgtctgatcatggtattgaaaatcaatagcctggcgcgcgggttttccgggattcggttgagcgtgatagaggcgctcatcgctctggtgaatgccggcgtgtatccgctgattccggcaaaaggctcggttggcgcgtcgggcgacttagcgccgctggcgcatctgtcgctgacgctgcttggcgaaggaaaagcgcgctggcagggcgaatggcttccggcgcagacggcgctaaaaaaggccggactggagcctgtcgcgctggcggccaaagaggggctggcgctgcttaatggcacccaggcatcaacggccttcgcgctgcgcggtttgtttgaggcacaggagttatttgcctccgccgttgtctgcggcgcgctgactaccgaagccgtactgggatcgcgccgtccttttgatgcgcgcattcatgccgcgcgcggacaacaggggcaaattgacgtcgcgcggttgttccggcacctgctgaccgataccagcgccattgctgaatcacatcaccactgtcataaagttcaggacccgtattcccttcgctgccagccgcaggtaatgggcgcttgtctgacccagttacgtcagacgaaagaggtactgctggctgaggccaacgcggtatccgataatccgctggtctttgccgatgcgggggaggtgatctccggcggtaacttccatgctgaaccggttgccatggcggcggataatctggcgctggcgatagcggaaatcggcgcgctatcggagcggcgcatcgcgctgatgatggataaacatatgtcgcagttaccgccgttcctggtgaaaaatggcggcgttaattccggttttatgattgcccaggtcaccgccgcggcgctcgccagcgagaataaagcgctggcgcacccgcacagcgtggatagcctgccgacctcggcgaatcaggaagatcatgtctcaatggccccggcggcagggcggcgactctgggaaatggcggcgaatacccgcggcatcattgccgtggagtggctggctgcctgtcaggggatagatttacgggaagggttaacctccagcccgttactggaacaggcgcggcagacactgcgcgagcaggtggcgcactatacgcaggatcgttttttcgcgcccgatattgagtgtgcgacggcgctgctggcgcaaggcgcgttacagcgtctggtgccggactttatgtgaatgctgccggatggagcggcgcttattcggcttacccaacccgttggcagggtaagacgtttacgccgccatccggcacagcgtttaactgaacatcgccgtgatcgaggcgctggcgagcgaatggaaatgcacgttaaagccgaccatcgcgccgctggcgtcttcatcaacgtcaagacgctcgacgtccagcgcgtgaaccgtaaagatatagcggtgcgtttcccctttaggcggcgccgcgccgccgtagcccgctttaccgaaatcggtacgcgtctgaatgacgccgtctggtacggccaccaggcctgagccgaacccctgggtcagtacgcgcgtatccgccgggaggttcaccaccacccagtgccaccagccggagccggtcggcgcgtcgggatcgtaacaggtcacgacaaaacttttggtgcccatcggcacgttgtcccaggccagatgcggcgaaatattatcgccatcatagcccataccgttaaaaacgtggcgatgaggaagtttatctccatcgcgcaaatcgttgctgataagtttcatgcgctctccttttgactcaccagaagtgtagccagaagcagcatcgcttaccgctgattaatggctaaaaaatgtttcattgtgtaccgcgtcattgaccgcctgggtcaaacggcgcagttgatccggacgaataatgtagggcggcatcaggtagattagcttgccgaacggcctgatccagacgccttgcccgacgaagaagcgttgaagcgccgccatattgaccggatgcgtggtttcaaccaccccaatcgcgcccaatacccgcacatccgccacccagggcgaactttgcgcgggggctaactcagcgcgtaactgagactcgatagacgccacctgctgacgccattcgccgctttccagcagcgtcaggttggcgcaggcgacggcgcaggccagcggattccccataaacgtcgggccatgcataaaacaccccgcctcgccgttgctaatagtctctgcaacctggcgtgtcgtgagcgttgccgagagggtcatggtgccgccggttaaggctttgccgagacacagaatatccggcgcgatcccggcgtgctcgcaggcgaacagtttgccggtacggccaaacccggtggctatttcatcggcaatcagcagaatgccttcgcgatcgcacatgttacgaatacgcctgagccattgtggatgatatatgcgcatcccgcccgcgccctgaacgataggttccagaatcacggcggctatttcatggcgatgcgcggccatcaggcgggcaaatggcgcgatgtcgctttcatcccattcgccatccatccggctttgcggcgccggcgcgaacagattttccggcagatagcctttccacaagctgtgcatggagttatccggatcgcacaccgacatcgcgccgaacgtgtcgccatgataaccgtggcgaaacgtcagaaaacgctgacgcgattcgccgcgcgcctgccagtattgcagcgccatcttcatggccacttccaccgacaccgacccggagtcggccagaaagacacactccagcggctcaggcgttatcgcgaccagcttacggcacagattcaccgcaggttgatgggttatgccgccgaacatgacatgcgacatggcgtcaatttgcgctttcatcgccgcgttcaattgcgggtggttataaccatgaatggccgcccaccaggaggacatcccctcaatcaggcgtttgcccgaggcgagaaccagctcgcagccttcggcccgctcaacgggatataccggcagcggcgaggtcatggaagtgtaaggatgccaaatatggcgtttatcgaaggccagatcgtccgttgtcataatcgacttgtaaaccaaattaaaaagatttaggtttacgagtctacaccatatcaaaaacaaacaacatattttggagaagcccgatggctcgccacccacgctggacactgtcgcaagtaaccgaattatttgaaaaaccactgctggaattgctgtttgaagcgcagcaaattcatcgccagcatttcgatccgcagcaggtacaggttagtacgctgttgtcgatcaaaaccggcgcctgcccggaggattgtaaatactgcccgcagagctcgcgctataaaaccgggctggaagccgagcgtttaatggaagtagagcaggtactggactccgcccgtaaagcgaaaaacgctggttcgacccgcttctgtatgggggcggcctggaggaatccgcatgaacgcgatatgccttatctggagaagattgtacagggcgtcaaagcgatggggctggaaacctgtatgacgctcggcatgttgaacgagagccaggcgcagcgtctggctaacgccgggctggattactacaaccacaacctcgatacctcgccggagttttacggcaatatcatcactacccgtacctatcaggagcgcctcgacacgctggaaaaagtccgtgaagcagggattaaagtgtgctccggcggcattgtgggtctgggcgaaacggttaccgatcgcgccggactgttgttgcagttggcgaacctgccgacaccgccggaaagcgtgccaatcaacatgctggtgaaggtaaaaggcacgccgcttgcggataacgatgacgtggatgcgtttgattttattcgtactatcgccgtggcgcgcatcatgatgccgacctcatacgtgcgtctttccgcagggcgtgaacagatgaacgagcagacccaggcgatgtgctttatggccggggcgaactcgattttctatggctgcaaattgttaactacgccaaatccggcagaggacaaggatctgcagttattccgtaagctggggctgaatccgcagcagaccagggtgctggcgggcgataacgagcagcagcaacgtctggagcagacgctgatgacgcctgacaccgatgattattacaacgcggcagccttatgagttggcaacaacgcgtcgacgatgcgctgacggcgcgtcgggtgacggatacgttgcgccgccgctatgtggtatcgcagggtgccggacgctggctggtagcgaacgggcgacagtatcttaacttttccagcaatgattacctcggcttaagtcaacatccgcagattattcgcgcctggcaacaggcagcgacgcgttttggcgtcggcagcggcgggtcgggtcatatcagcggttattccgtggcgcaccaggcgttagaggaggaactggcgcaatggttaggatatccacgcgcgctgctgtttatctctggctttgcggcgaatcaggcggtcattaccgccttaatgaaaaaaaatgaccggattgtggccgacaggttgagtcatgcttccctgctggaggccgctaatctgagtccggcgcagcttcgccgctttatccataacgatacgcagcatctgtcgcgtttactgcaatcgccctgcgtgggtcagcaactggtggtgacagaaggtgtatacagcatggacggcgacagcgcgccgctggcggaaatccagcacattgcccgcaggcatcatgcctggctgttggttgatgatgcgcacggcatcggcgtgactggcgatgaggggcggggcacctgctggctgcggggggtgaagcctgagttgctggtggtgactttcggtaaggggtttggcgtcagcggcgcagcggtgctctgctcggaaagcgtcgcggattatctgctgcaatttgcccgtcatctggtttacagcaccagtatgccgcccgcccaggcgcaggcgttaagcgcctcgctggcggtgatccgtagcgatgaaggtggtgaacggcgcgaaaaactcgccgctctggttcagcgctttcgggccggcgttaacgcgtcccgatttacgctactgaatgcccatagcgccatccagccgttaatcgtgggcgataacagccgtgcattgcgcctggcggaggcgctgcgtcaacaaggatgctgggcgacggcgattcgcccgccgacggtgcctgtcggcacggcgcgcctgcgcttaacgttaacgcaggcgcatgaagcgtgtgatatcgaccgtctgctggaggtgctgcatggcgcaggtgaataagcaggctattgcggcggcgtttggccgggccgcatcgcaatatgaacagcacgcctctttgcagcaacacagcgcggatgcgctgctgacgctgttgacaggccgccagtttgccagtgtgttggacgcaggctgcggccccggacgtatgagtcgttactggcgagagcgggggagcgaagtgaccgccctggatctttctctgccgatgctgcaacaggctcgcgatcgtcaggcggcgcatcactatttgctggcggatatcgaagcgattccccatgacgccgaagtttttgacctggcctggagcaacctggcggtccagtggtgtggcgatttacgcgatgcgttgagcgagttgtatcgggttgtacggcccggcggcgtggtggcgtttaccaccttgtgccaggggtcgttgccggagctgcgtcaggcatggcaggccgtcgataatcgcgctcacgcgaatagctttttgccggaagaggccattgaccacgcgctgcgcggctggcgggcgtttcgtcatactcaggcgatgacattgtggtttgaggatgccctgagcgcaatgcgctcgcttaaaggcattggcgccacccatcttcatgaagggcgggagtcggatgtattaacccgcgcccggcttagacagattcaactggcatggccgcagcggcaggggaaatatccgctgacgtaccatctttttatgggagtgattgaacgtgactaaacgctattttgtgaccggtactgatactgaagtcggtaaaacggtcgccagttgcgccttattgcaggccgcaacgcagttaggttatcaaaccgtaggctataagcccgtcgcttccggcagcgaaatgacaaccgacgggctacgcaatagcgatgccctggccttgcagcgtaacagcagcctgccgcaaccttattccgctatcaatccttatacttttgccgagcctacctctccccacatcgttagcgccgacgaaggccgggcgatagacgcggcggtgttatcacgcggattgcgaacgctggaggcgcaggcagactgggtgttgacagaaggggcgggcggctggtttacaccgctctctgccacgctgacgtttgccgactgggtacagacggagcagctgccggtgattctggttgttggcgtcaagctgggctgtattaatcacgccatgctgacggcgctggcggtagaacaggccggattaccgcttgtcggatggatagccaacgacatacagccgccaggcgcgcgtcatggtgaatatctcgcgacgcttcgccgcgtcataccggccccgctattaggggaaatcccgtggctgggcgtttctccatcgcaggcggcgacaggacagtatctggaccttagccccctggaacgcgcctgactgcgcttaaaaactgccttcttgcaggatcagacgatcctgctgttttttcgccagaccttcctgacgtcgccatgctaaaaatgtgcaaaatgtgagcgtctacgcctcaatttttcccttctcgttagccaataatctgccaaaaatagcgataatttttttttatcgcccggcgaaaacgtcaggagctgattttgccaggcggcaggggatacgggctggaagcagttatccactattcctgtggataaccttgtgtattagagttagaaaacacaacgtaagcgagaggcgacgcggcctgcgactaaattggcgcgaaagacggcttgagaaaatatcccttttcagacagcaagttatataaaatcaatggttgtaaaggaagggggatacgttgacataaaactttcatcatccgacttgacaaatgttaaaaaagactctggtctggggataaccagcacactgctggaattttaccccgcgactgtctatgttttacctctaaatagcgtggggtatctgccgatagccattatacactggagtgttactgttttttcatccagtattttttattggcaatattcaccgtcgagagtaaaattacacccctgcccgctcactccttcaggtagccgctcatgagtaaaccgttcaaactgaattccgcttttaaaccttctggcgatcagccggacgctatacgtcgtctggaagaggggctggaggacgggctggcgcatcagacgttattgggcgtgaccggctccgggaagacattcaccattgccaacgtcattgcggacttgcagcggccaacgatggtgcttgcgcccaataaaaccctggcggcgcagctctacggcgaaatgaaagagtttttcccggaaaacgcggtcgagtatttcgtctcctactatgactactatcagccggaagcgtatgtgccaagctcggatacgtttatcgaaaaagacgcttcggtaaacgaacatattgagcaaatgcggttgtcggcaacgaaagcgttgcttgagcgacgcgatgtcgtggtggtggcttccgtgtccgcgatttacggtctgggcgatccggatctctacctgaaaatgatgctgcatctgacggtgggaatgctgattgaccagcgcgcgattttgcgtcggctggcggaattgcaatacacccgtaacgatcaagcttttcagcgtggtacctttcgcgtgcgcggcgaagtgatcgacatcttcccggctgaatctgacgacatcgcgctacgcgttgagctgtttgatgaagaagtggaacgcctgtcgctgttcgacccgttaaccgggcaggtagagtcaacggtgccacgttatactatctatcccaaaacgcactacgtaacgccgcgcgagcgtattctgcaggcgatggaagagataaaagatgagctggcggacaggcgtaaggtcttgctggcgaataataagctgctcgaagagcagcgattaagccagcgcacgcagttcgatttagagatgatgaacgagctgggctactgctcaggcattgaaaactattcccgctttctgtcgggccgcgggccgggcgaaccgccgccaaccttgttcgattatctgcccgccgacggactgctggtggttgatgagtctcatgtcaccatcccgcagataggtggcatgtaccgcggcgaccgggcgcgcaaagagacgctggtcgagtatggcttccgtctgccttcggcgctggataaccgtccgctgaagtttgaggagtttgaagccttagcgccgcaaactatctatgtttccgccacgcccggcaactatgagctggaaaaatctggtgatgaggtggtggatcaggtcgtgcgaccgaccgggctgctggacccgattattgaagtgcgtccggtggcgacccaggtggacgatctgctgtccgaaattcgtcagcgtgcggccattaatgagcgtgtccttgtcactacgcttaccaaacggatggcggaagatttgaccgaatatctggaagagcacggcgagcgcgtgcgttacctgcactcagatattgataccgtggagcgcatggaaatcatccgcgatttgcgtctgggcgagtttgacgttctggtggggattaacctgctgcgcgaagggctggatatgccggaagtctcgctggtggcgattctggacgccgataaagagggcttcctgcgctccgagcgctccctgattcagaccatagggcgcgcggcgcgtaacgttaacggtaaagcgattctgtatggcgataaaatcacgccgtcgatggcgaaggcgattggcgaaaccgagcgacgtcgcgagaagcagcagaagtacaacgaagagcacggtatcactccgcaggggctgaacaaaaaagtggtcgacatcctggcgctggggcagaacattgcgaaaaccaaagcgaaggggaaaggcaagggccgttctacggcaaaagccggaattgtcgaactggatatgacgccgaaagcgttgcagcagaaaattcatgaactggaagggcaaatgatgcagcacgcgcaaaatctggagtttgaagaagccgcgcaaattcgcgaccagttgcaccagttacgcgagttgtttatcgcggcgtcctgacaatgtgtcgatcgccagcgagtcatcgttaccatggctcgcttttgagaatttcagtgcaatagtaagggctaagtcagtcaggaatgaaaaacagtgacaggctttgactaacgggattgtcgaaaaactcaaaacatcaatggggtagctagtttaatcacaactgaagaaaattagcgttgaggctgaacccaacgctaattttccctctctcctcggctatgaaaaaaaacgccccgtattatcggtatagctatccttatgatcgtcattttaatcttatatgagttcgttgaaagcgtgtcatggcaacagattacatcattctacttaaaaaagaggtgatggaagcgcgagcatctataagtcaagcgctgcaaatactgaatgatttgtccgaaataatgacgactgtgacctcttatttaaagttgagaatatccttatctgttactttaggttacgttcagatcaggtagggaaaatatgtttaatattactaatatacaatctacggcaaggcatcaaagtattagcaatgaggcctcaacagaggtgcctttaaaagaagagatatggaataaaataagtgcctttttctcttcagaacatcaggttgaagcacaaaactgcatcgcttatctttgtcatccacctgaaaccgcctcgccagaagagatcaaaagcaagtttgaatgtttaaggatgttagctttcccggcgtatgcggataatattcagtatagtagaggaggggcagaccaatactgtattttgagtgaaaatagtcaggaaattctgtctatagtttttaatacagagggctataccgttgagggagggggaaagtcagtcacctatacccgtgtgacagaaagcgagcaggcgagtagcgcttccggctccaaagatgctgtgaattatgagttaatctggtctgagtgggtaaaagaggcgccagcgaaagaggcagcaaatcgtgaagaagccgtacaacggatgcgtgactgcctgaaaaataataagacggaacttcgtctgaaaatattaggacttaccactatacctgcctatattcctgagcagataactactctgatactcgataacaatgaactgaaaagtttgccggaaaatttacagggaaatataaagaccctgtatgccaacagtaatcagctaaccagtatccctgccacgttaccggataccatacaggaaatggagctgagcattaaccgtattactgaattgccggaacgtttgccttcagcgcttcaatcgctggatcttttccataataaaattagttgcttacctgaaaatctacctgaggaacttcggtacctgagcgtttatgataacagcataaggacactgccagcacatcttccgtcagagattacccatttgaatgtgcagagtaattcgttaaccgctttgcctgaaacattgccgccgggcctgaagactctggaggccggcgaaaatgccttaaccagtctgcccgcatcgttaccaccagaattacaggtcctggatgtaagtaaaaatcagattacggttctgcctgaaacacttcctcccacgataacaacgctggatgtttcccgtaacgcattgactaatctaccggaaaacctcccggcggcattacaaataatgcaggcctctcgcaataacctggtccgtctcccggagtcgttaccccattttcgtggtgaaggacctcaacctacaagaataatcgtagaatataatcctttttcagaacgaacaatacagaatatgcagcggctaatgtcctctgtagattatcagggaccccgggtattgtttgccatgggcgacttttcaattgttcgggtaactcgaccactgcatcaagctgtccaggggtggctaaccagtctcgaggaggaagacgtcaaccaatggcgggcgtttgaggcagaggcaaacgcggcggctttcagcggattcctggactatcttggtgatacgcagaatacccgacacccggattttaaggaacaagtctccgcctggctaatgcgcctggctgaagatagcgcactaagagaaaccgtatttattatagcgatgaatgcaacgataagctgtgaagatcgggtcacactggcataccaccaaatgcaggaagcgacgttggttcatgatgctgaaagaggcgcctttgatagccacttagcggaactgattatggcggggcgtgaaatctttcggctggagcaaatagaatcgctcgccagagaaaaggtaaaacggctgttttttattgacgaagtcgaagtatttctggggtttcagaatcagttacgagagtcgctgtcgctgacaacaatgacccgggatatgcgattttataacgtttcgggtatcactgagtctgacctggacgaggcggaaataaggataaaaatggctgaaaatagggattttcacaaatggtttgcgctgtgggggccgtggcataaagtgctggagcgcatagcgccagaagagtggcgtgaaatgatggctaaaagggatgagtgtattgaaacggatgagtatcagagccgggtcaatgctgaactggaagatttaagaatagcagacgactctgacgcagagcgtactactgaggtacagatggatgcagagcgtgctattgggataaaaataatggaagagatcaatcagaccctctttactgagatcatggagaatatattgctgaaaaaagaggtgagctcgctcatgagcgcctactggcgatagctgaacgcagtttatcagaagagggagagagcctgtttacccttcggtgtaaacaggcttctgataagcgcagcgtcgtcggtaaacgggcttaacccaacgcctgtagcgctttttccagcgcattatgtaataactgacgatcgtggcgataggggatatcgctggcctccagcacttcctgaatcaccagccgatcgttcaccgcactgacgtcaactcgcggcccaaccactactgcgtcaatgacttttttgccaatatattgctccatcatcgccagcttatcgaccagcgttaaactggcggcgggcagactcagttcgcgacccagattgccgatatacaccattggcgctggggtgcgccgcagcgcctgcgccagttcatccagcagcaggcaaggcatcaggctggtataaaaactgccagggccaatcagaatcagatccgcgtcattaatggcctgtaccgcttcccgcgtcgccggaacgtttggcgttaacatgatctcctgcggcggcgtcgctaactgatcgatattcacctcgccataaatctcatgcccctgatcgtcaatcgccatcagatctaccggtagctccgacatcgggatcagctgcgcgtccactttaagcagattacgaattaaattaatcgcttccagaggccgcacgctcaggtgatctaacgcctttaacatcaaatttccgaggttatgaccagaaagttcgccattaccgccaaaacgatactcaaacatagcggacgcgacgctaggttcggtaattaactgattcagacagttgcgcatatcgccccaggcgatcccgccttccgagcggcgaatacggccagttgaccccccgttatctgtggtagtcacaatgccggtcaggcgcgaacctaatgaagaaagcgaggagaggacgcgtcctaatccatgccctccgccgagggcaacgacacgatcaaggtcagccagcgtacgattgcgcataaaaattcctgaagtcaaataagcagcgctacagtagcgcaagtcgcgggttttcagcaattagccgaccggctaaaagacaattaattattcccgactacccctttatagcgagggcgttaccacggctaaatgatatatatcaatgtaaaagtgtgattttcacgtattctgtcgctaaatagcacgatcatatcgctatgtatatgtttatatagcgaaagcgtgatggcgaaattgtcatttacacgctagtatcggcgtaaccacagtaaacactctagcctctgcacctgggtcatttttgatacggtgctttggccgtgacaacgtttaacgtttgccaccagggcgcaggaagaaatgactccgcctcccgtatttggaaaggtgtacatggcttcacaacttaccgatgctttcgcgcgtaagttttactacttgcgtttgtcgattaccgatgtgtgtaactttcgttgcacctactgtctgccggatggctacaaacctggcggcgtcactaacaacggtttccttaccgtcgatgaaattcgtcgcgttacgcgcgcttttgccagtcttggcacggagaaggtgcgtcttaccggcggcgagccttcattacgccgcgattttaccgacatcattgccgccgtgggtgaaaatgatgctattcgccagatcgcggtgaccactaacggttatcgactggcgcgcgatgccgcgaactggcgcgaagcggggctgacgggcgtcaatgttagcgtggatagtctggatgcgcgtcagttccatgcgattaccggtcaggacaaattccgccaggtgatggcgggcatcgatgccgcctttgacgccggtttcgaaaaggtgaaagtcaacaccgtgctgatgcgcgacgtgaatcaccatcagttggataccttccttgcctggattcagcctcgccccattcagctacgcttcattgaacttatggagacgggcgaggggagcgatctcttccgcaaacatcatatttcgggtcaggtattacgcgacgagctgattaagcgcggttggatccaccagctccgccagcgcagcgatggcccggcgcaggttttttgtcatcccgattacgccggtgagatcggcctcattatgccgtatgaaaaagatttctgcgccacctgtaaccgcctgcgtgtttcgtccgtcggtaagctgcatttatgtctgtttggcgacggcggcgtgagtttacgcgacctgttacaggatgacgcgcagcaatacgcgcttgaggaacgtatttccgacgcgttgcgggagaaaaagcagacccactttcttcaccagagcaatactggtattacgcaaaatttatcttacattggcggttaatccttaataaggagatttcagatgagtcaggtcagcgctgaatttatcccgacccgcatcgctattcttactgtttccagccgacgcggcgaagaagacgacacctccggtcattatctgcgtgattcggcgcaggaggccgggcatgaagtggtggcgaaagccatcgttaaagagaaccgttacgcgattcgcgcccaggtttccgcctggatcgccagtgatgaggtgcaggtcgtattgataactggtgggaccggtttgaccgaaggcgatcaggcgccggaagcgctgttgccgctgttcgatcgtgaagtggaaggatttggcgaagtgtttcgcatgctctcgtttgaagagatcggcaccgcaactctgcagtcgcgcgcggtagctggcgtggcgaataacaccttgattttcgccatgccgggctccacaaaagcgtgcagaaccgcatgggagaatatcattgcgccgcagctggatgcccgtacacgcccatgtaattttcaccctcatttaaagaaataacgatgtcgcaattaacccatataaacgccgcaggcgaagcgcacatggtggacgtttccgcgaaagcggaaaccgttcgtgaagcgcgtgcggaagcattcgttaccatgcgtagtgaaacgctggcgatgattgttgatggcaaacaccacaagggcgatgttttcgccaccgcccgaattgccggtattcaggccgccaaacgcacctgggagctgatcccgctgtgccacccgctactgctaagtaaagtggagattcagcttcaggccgagccggagcataaccgcgtgcgtattgagtctctgtgccgtctgaccggtaaaaccggcgtcgaaatggaagcgttaaccgcggcgtccgtcgcggcgttaaccatctacgacatgtgcaaagcggtacaaaaagatatggtaattggtccggtgcgcctgctggcgaaaagcggcggcaaatcgggggattttaaggtggatgcgcatgattaaagtgcttttcttcgcccaggttcgcgagcttacaggaactgacgcgctggatcttccagcagatttttccaccgttgagtcgctgcgacagcatctggcgacaaagagcgatcgttgggcgctggcgctggaagatggcaagctgttggcggcggtcaaccagacgctggtaagttttgaccatccgctgacggcgggcgatgaagtggcgtttttcccgccagtcacggggggctaacatgcacgaaacgcgaattgtagtcggccctgcgccgtttagcgtcggggaggaatattcctggctggcggcgcgcgacgaagacggcgcggtcgtcacctttaccggaaaagtgcgcaatcataacctgggcgatagcgttaaggcgctgacgctggagcattatcccggcatgactgagaaagctctggcggagatcgtcgcaaaggcgcgttcccgctggccgctggggcgggtcacggtgattcatcgcgttggcgaattatggccgggcgatgagattgtgtttgtcggcgtcaccagcgcgcaccgcagtagcgcgttcgacgccggtcagttcattatggattatctgaaaacccgtgcgccgttctggaagcgtgaagccacgccggaaggcgatcgctgggtcgaagcgcgcgacagcgaccagcagttggcgaaacgttggtagcagaatgtgatacgctttagggtatcatttccacacaggagttcatcatggacagatttccacgatctgattcaatagtgcaggcgcggtccggcctgcagacctatatggcgcaagtgtatggctggatgacggtcggactgttactgaccgcgtttatcgcgtggtatgcggctaatacgccagccgtcatgatgtttgtcttttccagtaagatcactttctttggcttaattattgcccagcttgcgctggtgtttgttctgtcgggactggtgcataaacttagcgccggaatggcgacgacgctgtttatgctctattcggcgctaaccggattgacgttatccagtatttttatcgtttacacctactcctctatcgccagcacgtttgtggtgacggggggaatgtttggcgccatgagcctgtacgggtacaccactaaacgcgatcttagcggtttcggcaatatgctgtttatggcgcttattggtatcgttctggcgtcgctggtcaatttctggctgaagagtgaagcgctgatgtgggcggtaacctatatcggggtggtggtgtttgtcggtctgaccgcctatgacacgcagaaactgaaaaatatcggcgagcaaatagatacccgagatagcgctaatctgcgtaaatattcgattctcggcgcgttaacgctgtacctggactttatcaacctgttcctgatgttactgcgtatttttggtaatcgccgctaattatagcgatctcttaaaatcctggccctgcgccaggattttttttgtctatggaaaacccccagctaggctgggggttccggaaagctttcagctttaagccagttattaaaaccccttttgatttgttaaaacatcttgcggtctggcaactgcaaaagttcaacaagaaatcaaaagggggtcccaatgggggacgaaaagagcttagcgcacacccgatggaactgtaaatatcacatagttttcgcgcccaaataccgaagacaagcgttctatggagagaagcgtagggcagtaggcagcatattaagaaaattgtgtgaatggaaaaacgtacgaattctggaagcagaatgttgtgcagatcatattcacatgcttctggagatcccgccgaagatgagtgtgtcgagtttcatgggatatctgaagggtaaaagtagtctgatgctttacgagcagtttggggatctaaaattcaaatacaggaacagggagttctggtgcagagggtactatgtcgatacggtgggtaagaacacggcgaagatacaggactacataaagcaccagcttgaagaggataaaatgggtgagcaattatcgatcccgtatccgggcagcccgtttacgggccgtaagtaacgaagtttgatgcaaatgtcagatcgtatgcgcctgttagggcgcggctggtaagagagccttataggcgcatctgaaaaacctccggctatgccggaggatatttattaggactatatttagggcgaaacagcataaatatcttagaaatgttttcctacgcttgccattcttatcaccgtgatcatgtgaagagtgataaatgacaagtgggacctctggctgcaatacgtatacgacaaatagcatttattccctcgacaatgttatcccttacctattggtatactgcgttgggactatggtgtaccgccggcattatatggttaacgttgtatagtcattttttaataacccacgttcaacctgttgttgttttgtggatatcagcacttttgcttggcctggggtatggggccattacctgtctttcccgctttggcactgttgtcgcaacgttgatatatattgccatcattacgcttaccggcgtgtcattagcttaccttttctcaggtggcgcgaccattttcgtgattgttggaatcatgtttagtcttaatgccttatttattttctacctgaatatcagttctggtctattcaggccgttaatttttatggcggtaagcgggatcatcgctgcgatagttgtcaatagcctggtggccagtagcactctggtctggatagtcagtgtgctgacggtattggtatggacattgattacagcactagaaaaatcgacacttcatggttatgcccgcatgttataccacagcgagttttcatcgctgcctcgttgcgctttatttggcgcgctgacgctttaccttggcattattaatgctgtggttacgctgtgtcgttatatcattttgatgattctggaaatactattatctttcaggccgtaggcgttgcaggttttttattcaggttggtgatgatgggtataatgagtaaattatgtggcaaacaattttggttagcgttttgtgaagctaaagacgtcactcgcgccattaaaaatggcggcgaggattttaataagaaatgcccaccagcgctgatttctcatttcattaccggattgtcatgggaacattcattacccaatcctgcgcctgtttgcgcgtttagttttatgcttcttgtgggaggtgtgtgcagtgcgcattttgtttttgataagtttatcctgtattggccactaaatataattatttattttggcagtgctataggtattatgctatgtgttatggccgaggtatggcttattgccaaaggctttattctggggttgcgcctctgcgttttactgtttttgttaaatattatgctctgcggtactggattatttgacgtgttgtgccatcaaaatagcgaactaaagagtgatcttgttatcgcgattattatggttgtgctttgccgctgggtgatgaatggcgaaacgtttacgatgatgattcgtttctgcctggggcgtcgattagtgcgagttgcattacaaaaatatctcacctcacagacaaggaaatgataagcccatgaacctgatgacgtggctaacaggaaaaacactggcggagctggtgaaaaaagggcagttgatcccgccagaaattaagttacctgtgtatccggccagccactacaaaaaaaactggtatgaacaaggtattcctcacggaggcgttattgggcttacggcgatcatgatgaccatgacatggatcgtcagtataaacatggttattgcgcagtttgagctgcacaataaaaagcatctggagctggtcttcttcctggccgtgggctatatcgcttttcttaccccgtcaaatcagctcctgcttaaaggaagaatgagcggggttattatttaccgctatgcgctattactggtcattatttccgttacgttggcaacgttctgtaccctgtcatcagtattcatgggcgagtttcacgaagtgctcctgctgctgtttagctggtcattgctgcttttttcccgcttacagatgaatacgtcttttttctcagcatatgtttatttttaccggataaaacgcgttgtgctggaaagcgaaaacgcgtctgcttaaatttatttcgccatcgcccgctcgtttttcgcccgcagcttcttcgcccggctctccaggatcagatagcacaccagcgccagcaacaggggaataaaatagtaaagcacgcggtatgcgagcagggcggcgataatcgtgccttgcgacgtatgttcgcccgccagcaacgcaaggaatacggcctccagcacgccgatgcctgccggaatatgcacgatgacgcccgcgatactgctcaccagcagtacgcccagcacaaagaaatagttcacatcctgacccatcagcagccagatgatggcgcccatcgccatccagttcgcgctggagatcgccatctgcgccagcgcgaatttccatgacggcagcaccagtttctgtcctttaatcgtcatatgccgccgcttcgcaaaggcgcaaaaccacagatagaccgcgataatcaacaataaaacgataccgagaattcgtagcgtgcctgcatcgatataccagtggtcgggaagctggacaatgccgaaggtaaaaatgatgccgccaagcagaatatagcccagccagttagtggtaatgctgagtgagaaaatgcgcgtgatagtactgccgggcaacccgaggcgagagtatagtcggtaacgcatcccgatcccgccgacccaggtgctgagcgtcaggttaaaggcatagcagacgaacgataccaacatcacctgtcgcttcgccagtttatggccgcaataaagccgtccaagcaggtcgtagcagccgtacagaagatagctaacgatcaccagtcccacagcgcttaaaagcgccgtgcggttatagtcacggatgacggtccagacatcgccccagtcgacctttttagcataaaccaccagcagaacgacgaccgcaataaaaaacagccaggtcagcacttttttagccagccgccagcgcggatgcgatttagccattagggcttcactcctgtattttctggatcaacgcgatcctgggtttccatttctggctgggcaggcgggggaacctgcgccagatgcggggtatgcgccggtagccagccgaccagcgccgggaaatgacgtaaaaagtggaacgccagcacgcttttggtcaggttccaccaggtgcgtttcggcagcatagactcatcgacctgcttacaatcgttcacgatgatgccttgtaagttatcgcgcagggtctggttaaaagtacgatcgtgaatgatcaggttagcttcaaggttaagcgacaggctgagcggatcgagattactcgaccctaccgtggcccagtgatcgtccatcagcgccactttgccatgcagcggacgtcgtcggtattcataaacctgcacaccgcccttcaccagatagttatagagcaaccgcgcgccgactttgactatcggcatgtctggttccccctggacaatcagttttacgctcacgccacggcgggcggctttacgcattgcgtggagcaagcgatagccggggaaaaaataggcgttagcgataatcacttcacgctttgcctgggtcagcattttcagataatgacgttcgatatcgtcgcggtgttcttcattatcccgccagacaaacagcgcctgcgcttcgccggggtggcgattttcttcagcctgatgatggcgcttccaccagcggcgcgcggggctttgccccggcagattctcgacttcgaattgcaggatatcggccactacaggcccttcgacccgtaccgcgtagtcttgtttcgcctgcgggccgtaatccgacatatgttcggcggagtagttaatgccgccgacaaaggcaatacgatcatcaatcaccacaattttgcggtgcattcggcggaagatattggttcgcaaccccagtagacgcgggcgggggtcgtaatagcgaaaaatcacgcccgctgaggtcaattcgccgacaaacgcgtcgctgagatcgggagagccgtagccgtcgagtaatacttcggcttttacgccgcgctgtgcggcttttagcagagcggtatggagttttttacccacctcatcttcaaacaagataaaggtttccagaatgattttttgctgtgcctgagcgatagcctcaaacacggcaggatagaactggtcgccgttttccagtagctgaatttgattaccttcacgccagccgcatttcatagatggatctccgcgctaaggggggcatggtctgataaatgtcgccagttccgcagcggcagcgccgtaggagaactggcgttcgcattcttgacgtaaatacgatcgagtcgcagcagcggcatactcaccgggaatgtgcgcgccggtcggccatgggcacgggtgaatatctcctccagcccggccgcgtttaacggcgggccggccttttgccgccagtcattaaagtctccggccaccagcaccggttctgattccggcaaggcattcacccatcccgccagcatggttagctgtgcctggcggtgactctcccgcaggccgagatgtacgcacatgacgtggatagggcggttgagcatgggcggcgtaatgcggcaatagagcacgccgcgtttttcgctaccgccgaccgagacgtcgcgattttcataatgttcaatgggatagcgagaaagaaccgcgttaccgtgatggccttccggatagaccgcattgcggccataggcgaaatcgctccacatggtgtcggccaaaaattcatagtgggtagtgtccggccagttttcgatatgcagcggatgtacttcatgcgcgcccatcacttcttgcagacagacgatatcggcgccgaccgttctgacagcgtcgcgcagctccggcaggatgaagcgtttattaaaggcggtaaaacctttgtgcgtattaattgtgagcactttgaatgaaaaatttcgcgtgtgttgagtcattttcttcctgtccgcgtcactatcctgattgaaatagtgtagtcgtcgtcacaaaaagatgcggtcttacggaattttccgtaaagttcggtactctgaataatgagagaaaaatgcttcaggagaaaagccatgaagtggcaacaacgcgttcgtgtcgcaaccggcctcggttgttggcagattatgttgcatttactggtagtggcaatgctggtaataggctggatgagcggcacattagtgcgcgtcggcctgggattatgcgtgctttatggcgtgacggtactgctgatgctggcgttgcagcgccatcatgagcaacgctggcgcgatgtggcggatgtgctggaagagctgactaccacctggtacttcggcaccgcgctgattgtcctctggctgctatcccgcgtcttgcaaaacaatgttttactggcgctggcggggctggctatcctggccgggcccgccgtggtctcgctactggcgaaagataaaaagctacatcactttgcgtctaaacatcgcatacgccgctgaacccgtggtggccgctatcaccagtagcggccacaaacttccccagacaatccccagactcgcgtccttaagataaatttgcttagtaatatcagtaaagtggcggataggatttatccacgtcaggttttgcagccagaccggcatattttccaccggcgagacataacccgagagcaaaatcgccggcatcataaagacaaagacgccgataaacgcctgctgttgcgtggcgcaaagcgatgatatcagcaagccaaagcctaccagcgacagcccgtaaatcaccatcgtgaaataaaacagcgctaacgaaccggcgaagggaatttggtatgcccaaatgccgatagccagcacgatcgtggcctggaaggtcgcgacaatcagcgccggcaccgctttaccaacgaaaatctgccaggtggtgagcggagagaccagcagctgatccagagtgccttgttcacgttcgcgggcgacggacagcgaagtgacgatcatcacgccgatagtggtgatcatggcgatcagcgagggcaccacaaaccacttgtagtccagattcgggttataccagttgcgtaccaccagttcgctattgttgggctttggcttgccgtccatcaatgtctgctgatactccttgacgatctgttgcagataattggcggcgatttgcgcgctgttggagttacgtccatcaagaatgagttgcatcggcgcaggctggaaggtatccagattccgcgagaaatccgccgggaagcgtaccagcagtagcgctttttgcgtatcgatagtcggctggatctcctgcggactgttcagcaatagcacatgggtaaacgctttcgcgcgggcaaagcgctgggtaagttctaccgaatgtttgccgttatcttcgttatagatggcgatagtcgcgttagtgacttcaagcgtcgcggcgaacggaaacaggatgacctgaatcagcaccggcagaatcaggatcgcgcgcgtttgcggttcgcgtaaaagcgattgcagttctttgcgaattaacgtccataagcgatgaaacatgtccgtcctctcagtccagtttgtaggcctgataagcaaagcgcatcaggcataatgccggatggcggcgtgaacgccttatccggcctacgacgacaattatccatacacatatttaatccagccgtcgtttggtttttagccacgtcaggccaataaacatcaccgccgaggcgattaaaaacagtacgttaacgcctaacacgaccggaatattgccggccagaaacagactttgcagggtgctgacaaaatagcgcgccggaataatataggtcaccgcgcggatcaccgcaggcatactgtctatctggaagataaatccggacagcataatcgagggcaaaaacgcggcgttcagcgccacctgcgcggcgttaaactggttgcgagtgatggtggaaatcaacagccccatccccagcgtactcagtaaaaacagactggtgatgataaacagaatcaccagcgaaccgcgatacggcacgccgagaataaacaccgataccagcatacagagcagcatcgccagcataccgagaaagtaatagggaataagcttacacagcagcagttcaacacgcgtcacttcggttgagagcagcgcctccatcgtgccgcgctcccattcgcgggcaacgaccagcgaggtgaggattgcgccaattaccgtcatgataatggtcaccgccccgggaataataaaatgctgactgatcgccgccgggttaaaccagtagcgcgtctggacgtcgatgagcggttcaaaggtgtcgccgcgatcttccgcgcgctgctgttgccagatttgccagatgccttccacataaccctgaacgaagttggcggtgtttggctcgctgccgtcggtaatcacctgaatcggcgcgctgtcaccgtcgcgcgccatttgctgcgcgaaatccaccggaatcaccaccagtccgcgaatgcgtccggcctgcattttttcaattaattcatggcggttatcgctaatggtcgcgtcgatatagggtgaaccggtcatcgcatgagtgaaatccagcgcctcctggctttgttgttcaagcagaatccccacccgcagtttgctggagtcgaggttaatgccgtaaccaaaaataaacagcaacagcagcgggatcaccaccgcaatcagccagctactgggatcgcgcacgatctggcgcgtctctttgacgcacaacgcacgcacgcggcgccaggagagagacttactcatgcgtatgctccttatcccagtcattgatgagagtgataaaggcctgctccatcgttggatcggcctgttgctcatcggcggcctgcgctttgagatcgtccggcgtaccgctggcgataagcttcccgcgataaaccagtccgatgcgatcgcaatattccgcctcatccataaagtgggtcgtcaccattaccgtgacccctttttccaccatgctattaatatgcagccaaaattcacggcgggtgaggggatcaaccccggacgttggttcatcaaggaataaaatatccggttcgtgcatcagcgagcaggccagcgccagtcgctgtttaaagcccagcggcagcgcatcggtgggatgcgacgcgatgcttttcagaccaaacgcttcactcatgcgctgaattttttcattttgcgcgcggccccgcaaaccgtagacgccggagaaaaaacgcaggttctgctcaaccgtcaggttgccgtaaagcgaaaatttttgcgccatatagcccagatgctgacgggctttgccggagctgactttcaggtccatatccagcaccagcgccttgccggacgtcggcaccagcaggccgcacatcattttaaaggtggttgatttacccgcgccgttcgggccgagcaggccaaaaatctcgccgcgctgtacgacgaaattaacatggtccgtagccgcgaaatcgccaaattttttcgtcagttcctgcgcttcaatcaccgtttcgccggcagtgccttcaaccgtatgcaggattgaacccagcggagactccgaggttcccgctccgccaagcagatcgataaacgcatcttcgaagcgcggcgcggtctcattgagggtgatttccggcatcccttcggcctggcgaatatctgctgcggtcgcctcttttttcaggatcaggcgtaccgaacgtccctgaatcatgccgtcgctcacctgcggcagtctgagcgctctctgtagcaacttacggttgttttcctgtggactactcatcagaaagctacgaccggccatcgtttgcgtcagcgctttaggttcgccctgatagagcagctcgccttcattcatcagcagcacatcgcgacactgttcggcttcatccagataggaggtgctccataaaatcagcatcccgtcgcccgccagttcgtgaaccatttgccacaactcgcgccgtgaaatcgggtcaacgccaacgcccggttcatccaacagcagcactttcggttcgccgaccagcgtacaggccagccccagtttttgcttcatcccgccggacaatttccccgccagacggccagtgaaagggccgagggcggtaaattccaacaaacgggcaaaggtcttttcccgtatctcgccggtaacgctgcgtaaatcggcatagagattaaggttctccatgacggtaagatcttcatacagaccaaatttctgcggcatatagcccagaaccgcgtgcagctcgctgtcgttttgtatcgggtcgaagcccaatacggacgcgctgccgccatcggctttgagcaggcctgccagcatacgcattagcgtggtttttcctgcgccgtccggccctaccagcccggtgacataaccggaatgaatggtacagtcgagcggcgcgacggcgggtttatccattcccgcaaagcgcttcgtcagaccgtgcagcgtaataacggcctcactcatgccgtgcctcgtcattaaatttcaccgtgactggcatcccctggcgtaacgcatcgtccgcatcggtgacgataatgcgcaggcgatagacgagatcggtacgcagatccggcgtttcgacggttttcggcgtaaattccgcggtgggcgaaacgaaaccaatcttgccgtggtaaggtttgtcaggacgaccgtcggtatacaacagaatgtcgcgccccggttgcgtctgactgaggttgcgttcatcgacataggcgcgcacccagacggggcgggtcagcgagagcgttaataccgtgctgccggcgttcagcatactgccaggctcgaccgcgcgggtgagcaaggttccgttggcaggcgcgataagcgtggtgtcctgcaaatcaagctgcgcctgcgccagttgggcctttgcctgttccaggctggctttcgcctgggcgatatcctgttcacgattaccggtacggtactggctcagtttatcctgcgcggacttcagcgtcgcctgcgcctgatcgcgcgatgagcgggcgttttccagatcgttagcggaaatggtgcggcttttccacaatccttgctgacggttataaaagttttgtgcgtagtcataggcggcttgcgcctgtctgacggcggcggcggcctgggctatctcttcatcgcgatagcctgccagcatcaaatcatattgcgcctgcgcgaccgacacgccagctttcgcctgcatcagcgcgttttcgtatggcgcgtgatccagttcgccgagcacctgtccggctttgatagtatcgccttcatcaacattcagcgacgccagcctgccgccgacgcgaaagctgatattgacggtacggatatcgacattaccgtatagcgtcagcccatcgtcctgccgactttgataccaccaggttccaccggcaatcacagcgacgatcgctgcgattgccagtccgataacgacaggttttttcatcagtccagactcctttgcgttaaaccgtgcagaataagatcgatgtggcaggttaccgtctggtaaatcagctccgctttttcttcatcaaactgcggccagccggtacgtaacagaatagtttctttgccgagacgaaacgccagcacttcgcccagtaaggcatgggtatgcaaaatcatgcgcgtatcattggcgtcgcagccggtataagcggcaaccaatcttgtcagatgggtgtgcaacggatcgataacctgttcatggaccaattgataggccgacgtgggagagagctgctcgcgtgaaataaatttgctcaggttaacggtgtcttcctgcgtcagcagcataatcatgttcttgcaggcgagcagaatgagttcgcgtatggcgtcccggtcaggggcaggctggctaaacagacgctccgctttttcagcatgcgggcgaaatttttcgccaagaaaatcggcaatccactgggcgcaggcgaggtataaatcctcttttgagccgaaatagtaagtaatggcggcaatattttgccccgccagcgcggcgatatcgcgcgtggtggcatggaggccatactcgccaaactgcgccagcgcggcggcaatgagctgacttttcgcctgctcgcccttggtggtcgtggtgggaatattcatcacacgccctaatttttaatcaatcgattgattaagactatgactcataatggcacttgtccagtgtggtcgattaatttgtctttgctaccttccgggataatttatgcgccgcatcacaaaaactgctacactccgccccttcatgacattgtggtttttgtcattccaaatttgagcatctccctgaaaactacaccggcaacggtcggggcggtccggagtagttatgtcttttgattccctgggattaaaccctgatatcctgcgcgccattgccgagcagggttaccgtgaacctacccctattcagcaacaggcgattcccgccgtgctggaaggccgcgatctgatggccagcgcccagaccggaaccggtaaaacggcgggttttaccctgccattgttgcagcatctgattacccatcagccgcatgctaaaggtcgtcgcccggtgcgtgcgttgatcctcacgccaacccgcgagctggcggcgcaaattggcgaaaacgtcagagattacagtaaatatctcaatattcgctcgctggtggtatttggcggcgtaagcatcaatccgcagatgatgaaactgcgcggcggcgtggatgtgctggtggcgacgccgggacgtctgctcgacctggaacatcaaaatgccgtgaagctggatcagattgagattctggtactggatgaagccgaccgtatgctggatatgggcttcattcacgacattcgtcgcgtgctggcgaaactgccggcgaagcgtcagaatctgctgttctccgccacgttctctgacgacatcaaagcgctcgccgaaaagctgttgcgcaacccgctggaaatcgaagtggcgcgccgcaacacggcctcagagcaggtaacgcagcacgtgcactttgtcgataaaaaacgcaaacgtgaactgttgtcgcagatgattggccagggcaactggcagcaggtgttggtcttcacccgcaccaagcatggcgcgaaccatctggcggaacagcttaataaagacggtattcgcagcgcggcgatccacggtaataaatcgcagggcgcacgtacccgcgcgctggccgattttaaatccggcgatattcgcgtgctggtggcgacggatattgcggcgcgtggtctggatattgaagagctgccgcacgtggtcaactatgaactgccgaacgtgccggaagattatgtacaccgtattggccgtaccggtcgcgcggcggcaactggcgaggcgctgtcgctggtctgtgttgacgagcataaactgttgcgtgatatcgaaaaattgctgaaaaaagagatcccacgcattacgacgccgggctatgagccggacccgtcgattaaagcggagccgattcagaacggtcgtcagcagcgcggcggcggcggcggtcgtggacgcggacaaaatcaggggggagcggggcgcagtcagcagccgcgacgtcaggatagtggggcggcgaaggcgaaaccaaaaccgcgcacaggcgaggggaaaaccgctggcgacaaagcacgtccgccgcgtcgcccgcgcagaatcacgcctgcccagtaaattttatccggcaacatgcccggtagcgcgacgcttaccgggcctacggactatgcaaatacgtaggccggataaggtgcttgcaccgccatccggcaaaatacacatcgcgttgcgagccgccttccagaaccggtaaaaaaggtacttcccgcccctgaaatgtgacacaatagtggctgtttatacagtacttcaggttttctcatggcattgaccgctgcgctgaaagcgcaaatcgccgcctggtataaggcgcttcaggaccagattcccgactttattccccgtgcgccgcagcggcagatgattgctgacgtcgccagaacgctggccggggaagaagggagacatctggctattgaagcgccgaccggcgtcgggaaaaccctctcctatcttattcccggtatcgccattgcccgggaagagcaaaaaacactggtggtcagtaccgctaacgtggcgttacaggatcagatctttagcaaggatttgccgctgctacgaaaaatcatccccgatctgcgctttaccgccgcctttggccgcgggcgttacgtgtgtccgcgaaacctggcggcgctcgccagtagcgagcctacgcagcaggatctgctcgcctttcttgatgatgaactgacgcctaacaaccaggaagagcaaaagcgctgcgccaggctgaaaggggatcttgacggttacaaatgggatggtctgcgggatcataccgacattgctattgacgacgatctgtggcggcgattaagtaccgataaagccagttgtctgaaccgcaactgtcactattaccgcgagtgtccattctttgtcgcccgacgtgaaatacaggaagcggaagtcgtggtggcgaatcacgcgctggtaatggcggcgatggaaagtgaagccgtactgccggaaccaaagcatctgctgttggtactggatgaaggtcatcatctgcccgatgtcgcgcgcgatgcgctggagatgagcgcggaaattaccgcctcctggtatcgcttgcaactggacctgttcagcaaactggtggcgacctgcatggagcaatttcgccctaaaaccacgccgccgttagcgaaccctgagcgacttaacgcccattgcgaggaggtatacgaactgatcgcctcgctcaatgccattcttaatctgtatatgcccgcagcgcaggaggcggagcaccgttttgcaatgggcgagttgcctgatgaggtcatggaaatctgccagcgactggcgaagctgaccgagacgctgcgtgggctggcggaatcctttctcaacgatctcagcgaaaaaaccgggtcgcacgatattgtgcgtttgcatcgggtgattttacagatgaaccgggcgctgggaatgttcgaggcgcaaagtaaattatggcggctggcttcgatggcgcagtcttcaggcgcgccggtgtccaaatgggcgacgcgtgaaatacgcgaagggcaactccacgtctggttccattgtgtcggtatccgcgtcagcgatcagctggaaagattgttatggcgcagcgtaccgcacattattgtcacctcggcgacactgcgctcgctcaatagcttttcgcgcctgcaggaaatgagcggcttaaaagaaaaagccggcgaccgctttgtggcgctggattcgccgtttaatcatgtggaacaggggaaactggtgattcctcaaatgcgctacgaacccaccattgataacgaagagcagcatattgccgaaatggcggcctattttcgtgagcaactggagagcaaaaaacatcatggtatgctggtactgttcgccagcgggcgggcgatgcagcgttttctggagcatgtcgctgatgtgcgcttactcctcctggtccagggcgaccagccgcgttaccggctggtagagctgcaccgtaaacgggtggagagcggcgaacgcagcgtgctggttgggcttcagtcttttgccgaagggctggatcttaaaggcgagctgctgacgcaggtccatatccataaaattgccttcccgccgatcgacagcccggtcgtgatcaccgaaggcgaatggctaaaaagtctgaatcgttatccgtttgaggtacaaagtttaccaagcgcgtcttttaatttaattcagcaggtagggcgattgatccgtagccacgcctgtcggggagaagtggtcatttatgataagcgtttgttgaccaaaaactacggacagcgtttactgaatgccttacctgtttttccgatagagcagcctgccgtgccagacgttatagtaaaaccaaaagcaaaacctgcacgccgccgacggcgttaatgctgtgagcacacttcaaggagctttcaatggattatcgcaagatcatcaaagagatcgggcgaggtaaaaatcacgcccgcgatctggatctggataccgcgcgcggtttgtatacccgaatgctgaatggcgacgtccccgacctggaaatgggcagtatattgatggcgctgcgtattaaaggcgaaggcgaagccgaaatgctgggcttttatgaggccatgcagaatcataccatcaaactgacaccgcccgcagataggccgttgccggtcgttattcccagctataacggcgcgcgtaaacaggcgaatttaacgccgttgctggctatcctgctgcataaattgggcttcccagtcgtagtacacggcgtcagtgaagatccgacccgcgtactgacggaaactatatttgagctgatggggattatccccaccctacacggtggacaagcgcaggccaaactggacgggcgccagccggtgtttatcccggtgagcgcgctctgcccgccgctggaaaaacagctggcgatgcgctggcggatgggcgtgcgtaacagcgcgcattcactggccaagctggcgacgccatttgctgaggatgccgcgctgcgtttatcaagcgtttctcatcctgaatatgttccgcgtgtggcgaccttttttagccgcattggcgggcgggctttgctgatgcatggtaccgaaggcgaagtctatgccaacccgcaacgctgtccgcaaatcagcctgattgatagccgcggcgtgcaggtactgcatgagcgccagagcgacacgtacgacgagccgctttcactgcctgcgactaaagatcctgaaatcaccgcgcgctggattgagcgctgccttgccggccacgagccggtgccgcaatcattaaaaacgcaaatggcctgttgtctggttgcgacgggagaggcggcgacgttagaagacgggcttgcgcgcgtcgaacaggcttttagcgaataaaaaaagcccgtccagtgacggacgggcaaataagggtaacaaacagggttaatgagggttggagcagtgggtctgttggcaaacagacgagggtaatacccgtcagaattcaaacaacagcgatgttacagcctgaaatctggcgggcaggtaaattatttataaatcaccgcagtgccgctcattttgtcattacctacggcggaggtgatgttataagcgcttgcgccagcagcggcggctttttcagccagtttagcttccaggccatccagcgtggtggcgccatcggcagacactacgccgattttatgcaggttttgcgtctgagacgcgctaaccggttctgcggcaaaagcgccaaaagaaagggtggaaagcgcgatggctgcaacagcatatttaatggttttcatgattaatctctcgcaggttattctgtttatgggacgatgttccgtcgatgtgatgagtatcacggttttttgcgaaagataaaatcgaatagaattgactgccttgctcaaaatttttgaatgacaaataacctattgattattaattaattcaacggttgaatttacctttcttgtcatctggctttacagagtcgaggttaacggcacattctgcgacgcagaacgctaaaaagcatgagcgtaaaggaatggataatactggcggtttcggtaaagaaaagtcagcgtaactggctgtcttttgaacctctacgattatatcctgaaaatgttgcgttatgtaaatctttctcctgttggcaggctatgcataaccgaacgcccggcacggctttacgccgcgcttcagggataggatcgccgcaagattcgcattcatcgcgactttcgccgtggggaagttcgccgcgagcgcgggcaacggcatcttcaatggtattgttgatttgttcattcactgcgtcgtcatttgcccagccggatgccatcacgctctcctgattttagggtacctgaggttaagtgtagcgccgtcaggcgaaaaaatcgcatcgcgcggccttttcagaccatgagcagagccaatgtcattcagagagccgatcaaacgagcgaggcagggaattcgcggtggtatatttaccccgtggcgttatacgggtatcttacgccgctgctaaaaggagaatgccatgtccgcccagaaaccggggttacacccgcgcaaccgccatcaacaccgttatgatctcgccgcactgtgtcagaccacgccggaattgacgtcctttcttatccgcacgcccgccggtgaacagagcgttgattttgctaatccgcaagcggtaaaagcgctcaataaggcattgctggcgcatttttatgccgtcacacactgggacattccgccagggtttttatgtccgccggtgcctggtcgtgcggattatatccatcatctggcggatctgcttggcgaaacgacagggagtattccggcgcaggcaactattctggacgtgggcgtgggcgccaattgtatttatccgcttatcggcgtccatgaatatggctggcgatttaccggtagtgaagtcagcgacgcagcgatgtccagcgcgcaggctatcattcaggctaatacggggttaagccgcgccattcgtctgcgtcggcaaaaagatccggcggccatttttaccggtatcattcataaaaatgaattttatgacgcaacgctttgtaacccgccttttcacgactccgccgccgcagcccgcgcgggcagcgagcgtaagcgccgcaatttggggcagaataaagatgatgcgctgaactttggcggtcaacagcaggagctatggtgcgaaggcggcgaagtcgcctttattaaaaaaatgattgctgaaagccaatccttccgccgtcaggtgttgtggtttacgacgttggtgtcgcgcggcgagaatttaccgccgctttaccgggcgttgacggaggctggcgcggtgaaagtggtgaaaaaagagatggcccaggggcaaaagcaaagccgctttattgcctggacctttatggatgacgaccagcgtcgccgttttatcacccgtaaacgctaaatcgtcggttcgcgcggcggcagcgaatcaggcgacgggccgccgacgggggcgggcagaacctgatacgtttgcaccggcgcgcgcacattagccagatcaaaatgctttttcacctggctatcaagggcaaaacgcaccgtccactgcttgagcggtagcgtggtgaacgacacgcgtaaagtaaacgccgtgttcgttaaactgacaataccggcgaacgtgggttcgccgataatcagcccgcgaatatcctccgtctccatcagcgccgttaccgcgtctttcagcgcctgattcgctttatccgcatcctcatggcgatccacgtcatagttggcgacaacagagccgataccgcgcacaaagttggcgaaagtggtgatcgaggaccacgggataatatggtatgccccggtatcctgccgcacgccgacggaacgaatcgacattctttcgaccgtccccgtcagcgggcctatggtgactaagtcgccggtattcatcccgttttcaaactgaataaagacgccggtgataatatctttcaccagggtttgcgaaccgaaagagatagccagacctaacgcgcccgcgccagccagcaatggcgcgatattgacgccgatttccgataacacgatcatgatggttatggtactgataatcactgccagcgcattgcggaacagcgtcagcagcgtgcgcgtgcgggcgctgggtagcgggcggccatgaatatcggaggccagacgattctcaatcagactggcgaggatcgtccatcccacggcggagaagaataagattaacgcgatacggataaggatatcgaccatcttttcccccgcgccataatgtagccagtgccagaaatcgaatagcccccaggcgttgagcaacagcataacggcgacgcagacggtcaaaaagcgtgcgacttttagcgccgaggagagccagccgttaagccgcttttgtaattccgggtaattgcgctgcgtatggggcgacagggtgatggttttcgctatccagcgggtaaacataccggagataaacgccgcgatgccaataatcgccagactgcgcacggtcgcgcccatcataaacttcaggctattgcctgggtcgaataacgagaagaaaaacagcacgataaagtaagcgctggccagccagtgccacaccagcgcaaaggcgcggataaacaggctaaaaaaggctaatgatcgttccgccagacttaataaatgttgcgtaatctccgctttgtttttaaagatcaggtacagcgcccagatggtgatgcagagcatgatcgccacattagccatcgcgccaacctgaacattcacctggttggaaataatcggaacggcaacaattagcccgtagccaatcaaactgctaagggaactcatacggcgattccagtaacgcgctgtcgcatcctgaatcgcgaatgggcgtaattccggtacattagggcaaaaaataagccgcagaatcgctttaaagaactctattagcgcgaaggcattcaggaacaggctttgctgaaaagcgatagttcgacttcccgcatggaaattatcactgagcatctgaccgataaataaggtgagcgccagtagcaggaggtcgataataaacgcgccgacgatcatcgccgggagctgtaaccagttgctgcgttcacggtttttcttgcgtgcccacaggcccatttttcgatataacggcagggcgcaaagccgtatcacgctataaaaaccaaataccgcgacggccagaaataaaaagtgggttaacgcgttggtgaaggtttgcgagttaaacggcttgtgcggcgcatcggtgatgttgcgataaagctgggcgaaacgggtagcgaaagcatcgccgtactgacgggtaacggtggtgacgttctccagtaccgttttctcatctttggccgcaggcggcgcaagcgctggcgctggctcggtcggcggcgtggttgaggcttcgcggagttgcgctatcaattcgttacgtgaagcctcgttctccagtacgtcagccagggccgcataggccgcttttttttgttcaggactgggctctggcgctgcttgctggctggttgatgtccccgtggtcacgccgggtatggcgaccgcatgggcaggtgcgcccagtagacaaaaaaggatgaacagggtccaccgcatgactcctccagtgagaaaagagacgcaaaacactaagtatagatggcgcaggggagggaaaatgaaatgggactattccatgatgcccttcctgccgcagggctggaagggcgatatctcaggagacgtgctgtaaaaattcctgtaaacgtgggcttggcgggttttcgatcaacgcctgcggactgccatcttcggcaatacggcctttatcgataaaaatcagccgtgaggcgactttttcggcaaagccgatttcgtgagtgacaatgaccatggtcatgccttcttccgccagatcctgcatgactttcagcacttcatggcgcagttcagggtccagagcggaggttggctcgtcaaagagcatcattttcggcttcacggccagcgctcgggcaatggcgacgcgctgttgttgaccgccggaaagctcggaggggtagtggtgcgcccgttccgccagtccaactttcgctaacagagctttcgcctgtttttccgcttcttctttctttacgccgcgcacgcgcagaggaccgaacatcacgttttcgagcgcggtcagatgcgggaacagataaaactgttgaaacaccatgccggcttcctggcgaatcagccgttcgtctactttaggatcgttgactttcagaccatcgacaatcagatcgccggaggtgatctcttccagtttattgatacagcgtaataacgtggatttacccgaaccggaagggccgataatcacaaccacttcgccctgacggatgtttaaatcaatgttatgtagcacctgggtggggccaaagtgcttggagacgtttttaaattcaatcacaggattttcatccttctttcaagacgacgcaaaataaagctcagcaccagcgtaatgatcaaatagaagacggccacggcgctccagatttccagggcgcgaaagttaccggcaataatttcctggccctgacgggtcagctcggctacgccgataacaataaacaacgaggtgtctttgatgctaatgatccactgattgcccagcggcggcagcatacggcgcagagcaagcggtaaaataacatggcggatggtttcccggcgagaaaggcccagcgccagacccgcttcgcgaaaacctttgtgaatggatagtactgcgccgcgagtaatttccgcgatataagcgccggagttaatcataattgtcacgaccgctgcgctgaacggatcaatacgcaaatcattaaatgccatcggcagggcaaagtagataaacatgacctggacaacgatgggcgtgccgcgaataatttcaatgaaaaccagggcgatgtggttggcgaaccagccgccaaacgtacgggcaaaacctgccgccagtccaataaccaggccgccagccagaccgaggaccgagatccacagggtcattttagcgccctcaagcaaaagcggaatggcgggccagatggcgctccagtcaaactgcatatgtcgttcctgttaccgtggtgtaaatagtcaaatgctctatccggcgcggaaatggcggaaagtgtcttatccgtcacggaaagagctgtaggcccggtgagcgtcctcactaccgggccacaagccaacatcaggtcgttttatttaggttctgtaccgaaccattttttgtagatttcgttataggtgccattctcacgcagcgttttcagcgcgccgttgactttctcgcgcagttcatcgctgcctttcgggaaggcaactccgtattgctgtgcttccagcgattcgcctaccgccttgaactggccgttgcctgcggttttgataaagtacaggatgttcggcgtatcgtgcagaacggcgtctgcgcggttggtgcctaattccatgtacgcgttatcaatgttcgggaactgacgcaggtctttggttttgatattcgctttcgcgtaatccaccgacccggttccgctcttcacggcaacgactttgccatcgaggtctttaacgcttttaatatcgttattgttggctttcaccatcacgagcagaccgcttttgtaatagccatcggaaaagtcgatcgcttttttacgctcgtccgtaatcgtaatacccgccagcgccagatcgatatttttggtttgtaatgccggaataatgccgctgaaatccatcggtttcagggtgtagtccagcttcagttctttcgcgatagcgtcccacagatcaacatcaaaaccgacgtatttgtcgccctgtttaaattcaaacggaacgaacgccgtatcggttgccacaacgagtttcttatccgcagcgtgcgaagacaccgcaaaagccagggtaagtgcagccagtgaaacttttaatagagacttcatagcatttccttttctatccacggggcgatcccctgcgagaacatgtagcgtaatgaaaaaatcatgccaattatgtaactcattgttttaacagaagcgtgaaacattcctgtgcacaataagtcgggcaaaaccagtatgccgcaccgttttggggcactgatttagtgcatgaataacaaagtagagatacagggtctatttagcgtaaaaatcgttgttaaaacaatctttaattaacgattgtgtgatgtaattattacaaataattcacttttgtcggaggggagtacaagacgtgtgcactatttaagtgcaaaacccctgtgccaggcaggggtatagggatgacttatatacctgtgtacatcaagttgcaggtgcgttcgcttcagtgaccgacggaagtcaggcttctgcggattcgctgcgtttgtaccttcctgcaactcgaagtattcagggtagagatagatttattcgatgttggattcgataaaccacaggaatttatcgaggtcgcgtgatgcggcggtaaagatatcggcagtgtcttcatctttggcttcaccaatagctttgcgaacatcattagcgacaacagcgtagcgatcggccagttcttttaagtgatcctgcacgttatggatgtcgagcggatagcttttcagtggagttttgctgttgataacttgcgtggtgcctaacgccacaccgccaagctgtacggcgcgctcggccatagtatccagatgatcggtcagtgcggtacggaagccatccagcatctcatgaacggcaataaagttagcaccgcgcatgttccagtgggcctgtttcgtgatcagcgacaggtcaatgaactggatcacctgacgattaagcaactcaaccgtcgcttttttatcgctctctgatacatcgttacgggtataaagcagattagacgcttttgtttttaccagtttagcggtactcataatctcatatcctcttgatgtttgtgtcccaggtaattaacgaaaataagtatagcaccggtttttaactttgcttttttgaatttacctatcactttaatagtacagacaagatttaatatttattttgattaaaaatcaattggttagacgagtttgctgtttggtgggtaataattctcattttaatgtaaaaaatgagaaaaaatatgacaaaaaatgacgaagtaatagcgcaataataaaaggtgaataacgaggtgatattctgcatgattatgcacatcatgcagaataagaaactattttacgtcaacttgtttaatttgcggttcgcgtcgaatcgttagggtagaacccattgaggcggcaatgatggcgcacagggccaggatttgtatgcccgtaagcgtttcgcccagaaaaatcatcccggaaacggcggccagcgcgggttccatgctcatcagcgtaccgaaggtgcgggttggcaggcgcgtcagcgcaatcatttccagtgaataaggcagcgccgtagaaagcacagcgaccgctaaccctaagggaagaatcgaccagtgccatagcgcgtcgccagcctgaactgcgccaatcggcacgaaaatgatggcggcaatcagcgagcctaccgccaccgtggccggaccatgttccgcgcctgctcgctggccggtaagaatatagacagcccaacaggcgccagcgccgagcgccaacgcggccccggtaagatcgacgtgagacatatcttgtcctaatggcagcaggaaccagagcccaagcacagccagtacgacccaaataaaatctaccggccgccgggatgaaaacagcgcgaccgccagaggaccggtaaattccagcgcgaccgcaatacccaacggcaccgtctgaatcgacagatagaatagatagttcatcccgcccagcgacagaccataaaacaataaaggcagccgctgctctttggcaaaacgcaaacgccagggtttgaaaaaggcgataaggataagcgttcccaacgccagacgaagcgccgttacgcccggcgcgccgacaagaggaaataacgatttcgccagtgaagcgccactctgaatagaggacatggcaatgagcaaaaccaaaatgggcaaccagactggtagtttacgtgttgaccccggcatcctttctcctgtcaaaaaatgtcagtacgagtaaaggtggcagtgtaatggaaattccccgcggcggttgagggttcgttgaaaaaaaatttccaggattccataaaatgaacttaaattgatggataaatagactgttagtttaggaataatctggatgaatgtatcgcgccgcacgcgcattattggtgcaataagccggaaaagtgatgttaattgaataagatagcgcgatatggaaacgttctgttacatgaaaggcgcccttagacaccgtgaatcgcaaagagtttcccattaatttttgatatatttaaaacttaggacttacttgaagcacatttgaggtggttatgaaaaaaattgcatgtctttcagcactggccgctgttctggctttttccgcaggtactgcagtagctgctacttctaccgttaccggtggttacgctcagagcgacgcgcagggcgtagcgaataaaatgagcggtttcaacctgaagtatcgttacgagcaggacgacaacccgctgggcgtaatcggttccttcacctacaccgaaaaagatcgtactaacggtgcgggcgattacaacaaaggtcagtactacggcatcactgccggcccggcttaccgtctgaacgattgggcaagcatctacggtgtagtcggtgtgggttacggtaaattccagacgaccgattacccaacctacaaacatgacaccagcgattatggcttctcctatggcgctggtctgcaattcaacccgatggaaaatgttgctctggacttctcttacgagcagagccgtattcgtagcgttgacgttggcacctggattgctggcgtaggttaccgcttctaatcacgtcggtgaaaatgaaaaatccgcctttcggggcggattttttttgcctgaaacgtgcattattttagtgaaaaaatatcgctgcccagatggttatagtccactttctgtaatttgaaattggtgatataaacgggcccggctttctgttccgaaataaatcgatagcgatttttgatctctttagcgctaattcctgtccattgcgagaaaaaactcaggaaatcgttcgcggaacggcgagctttaatgatccgatgcgctttactgtcgctggatagcaccataaacggcacctggaagttttgctggaatttgtcgtcatgcgccaggtactgtaccgctttgccgcgctctttaaacgccagcccgtgatcggagaaatagacgagcgaaaaactgtcgccgctatgacgaagctgagtatagagctgacggagcaaatcgtcggtttgcgtcatggtgtataaataacaagacgtctctttcgactggacaaacgtcgcgtattttccctgagtacggtcgcaggcctggggatgcgaccccattaaatgcaacacaatcaactgcggttgcgtgcgttctgtcgccaatacctgcgccgtcatggttaacagcgcttcgtcgcgagtatttttatccgcttcaaaatcgccgtttttcaggaaatgcgcttcatcggcgcgtttggcgatactggcgatggccgtgtcgtattcgccgatttgcccctgattggaaaaccaccatgtctgaaaaccggcgcggttagccagcgtgacgaaattatcctgatactgtggtttgttatccaccacgcgattgagcgttaaaccgagcgatttttgcgttgagccgctggcggcgatgtaatccataaagaagtcgccattcacatggctggcgaagggggtattatcccagtggccgccgaaagcgcccatggcatcccgtcgcgcgctttcaccaatcaccacgacatagatgtgatatctgggtttcaccgcagtaaccgtccagctatcttttatgccggatagctgcgccatacggtgctgctcttcaatgacttcgttgttattgacgataacgtctttggcgaagcgaaaaaccggatagccggtatcaataaccttaaaaacgccgccccacgccagattttgtaccggcgcgacgaaaaatgccgcgacgctaatcagcaggcacaggctgtcgaggctattccagcgcggcctggcctcttcttttcggcggcgaagcgcaataatacccagcgcaaaaataaaaagtccggtcaggtagctataccacgggaagatggtcaggatttcgctcgactcttccatattggtggagtgcagcgccagcagcgtattaaagttcggcgcgccgtaagcctggccaaagggaaaatagcaagcggctaccagcgaacagatgccgagcagcgctttttgtccgcggggcaggtagcgccagagcaacagcaacaggcaggtaaacgccgcggtataaagcaggctaaaggggtagccgagcgcgaggttaatcagcagcgactgtaaaaagtagaggcccgcccacgggcttacagcccgacgacgggccagaagtgaatcgataagggttgaattcatatgccactattgcaaaaacgccatgtgctaaccctggcgcgaagggtcattacctgcctgattatgcgtaaaaaaggtattgggttcgcaacggcgagtcgcaaaatattcagggctgccagaagatagagcgtgcgggtaagaaggtcaaccgccggaaagaaaatgttttgcgaagagaatagcaaaaccacaaaaaaacaggggaaatgggcgccatttccgttgaggatgcaaaataaagcggcgtaccgcaccgccgcgttatttcgtggaagggttatcctgctccggtttgccgttgatcatatcgcacaacatagagagcagcattaaccggactttaaagggagagtgactgaacacgcgtatacacctcttaaattcgttcatataaacctcctgatgtttctatcccatcgatccgtgagggatgtctgcattacatacagatatagcacaggctatgttttatagctattgctaaaacgttaattttttgtgcccagacaactctggtttacaatgagcgctctgtcagctgacgcgttaacgcgtcacagaaacgaggaagcaaaatgggtcgtcgcgcaggtacgccaacaacaaaaaaagtgacgcaattggtgaacgtagaagaacacgttgaaggatttcgtcaggtcagagaggcgcatcgccgtgagttgatagacgactacgttgagctgatttccgatttaattattgaggtaggggaagcgcgtcaggtggatatggcggcgcggctcggcgtctcccagccgactgtggccaaaatgcttaagcgcctggcatcgttaggatttattcaaatgatcccctggcgcggcgtttttctgacgccggaaggggagaagctggcgcaggaaagccgcgagcggcaccaaattgtcgaaaattttttactggtattaggcgtaagtccggagatcgcgcgtcgtgatgcggaagggatggaacaccatgtcagccaggagacattggatgcctttttggccttcacgcaacagcatggaacatctgcagaatgagtctggcctttttacgggcgctgcggcgtgaccgtttttttcagttgttgatcattgtggggatggcgttaagcctgtttgttccttttgcgccccgcgcctggcctggcgcgattgactggcacaccattattaccctcagtgggttaatgttgctcactaaaggcgttgagctgagcggctattttgatgtgctgggacgcaagatgacgcgccgatttcataccgagcggcaactggcgatgttcctggtgctggctgcggcggcgctgtcgacctttctgacaaacgatgtcgcgctgtttatcgttgtgccgctgacgataacgttaaaaaaactgtgcgcgattccggtcaaccgattgattatttttgaagcgttggcggtgaacgccggttcgctgctgacgcctgtcggtaatccgcaaaatattctgttgtggggacgctccggcttaacctttgctgaatttagcgggcaaatggcgccgcttgccgtcatgatgatgctgacgttactgctcctgtgctggttttgttttccgggtagggcgttacagtatcataccggtacgcgttcgccgcagtggcagccccgtctggtgtggagttgcctggcattatatgtcgtttttcttaccgcgctggagctcaggcaagagttatggggactggtgttggtggcggctgggtttattgtgctggcgcgcagggtgatagtcagcgtggactggacgctgctgctggtatttatggcgatgtttattgatgtccatctgctaacgcaattgccggcgttgcagggcgttttcaaccaggttggcgcactgtctcacctggggctttggctaaccgctatcggcctgtcgcagattatcagtaatgtgcccagtaccattctcctgctgaactatgtaccggcctcgacgctgctggcgtgggcggtgaatatcggcgggtttggtctgctgccggggtcgctggcaaatcttattgctttacggatggcgaacgatcgccgaatctggtggcgatttcatttctattcgctgccgatgctggcatgggcggcgctggtgggatatggattattgcaactgatgccgtaagagaagcccgatagtatctatcgggcttcgcaggcagagtctgtcagttcagacgaaccggcatcccggaacgatcctgaactgcctgttgtacgacggtctgatcaacgtcaggctcgttggtgacggccaggatactcttattaagcgtgatcggcaccgcttccttaccttcaaactgcgcttccgtcgttgacagcgggttatgcacctcaatgtaacggctaccgtccggctcggtggtggcttttaccggttcatcgataaactgcacgcgggtaccgaccggcacattttcaaacaggaatttgatatcgtcgttgcgcagacgtacgcagccgtggctcacgcgaagcccgatgccgaagttggcgttggtgccgtgaatagcatacaggcgaccgatgtacagcgcgtacaggcccatcgggttatccgggcccgcaggcacgacggcaggcagcggctcgccggcggcgcgatattcagcgtgcatttttgccgtaggcgtccaggtcggaccggcttttttacgttcaactttggtcgtccagttgataggcgtgtctttacctaactgaccgatcccaatcggcaggacgataacggtgtttgtgcctttcgggtagtaatagaggcgcatttccgcgctattgatgataatgccttcgtgtacggtatccggcaggatcagctgctgcggaatattcagcacggtaccgcccttcggcaggaaggtatccacgccagggttggcttccagcatgttggagagccccatctggtactccgcggcaaaatactccagcggctgggtattgccctccggaacggtgatgacctgattttgcccaattaaacggctaccatcggtaggcagcgggtaagtgactgctgaggctgttttacaaaaaccaactacagcgaaagccgccgcgaaaagcgttgttaatttcatattcatgttatgcgagattctgtgccaagcaggctagtaggttgagaattctgtcatgttgggagcgcattataggtgcattccagtaaacagggaattcagatgtgtacgaaatcacgtttttttcccttacggttcagtgtagccctttgtacagggcgcgatcttatttcagacttgtggcataataagcggtttgtcacatcttttttcaggataagcttgtgttagtttccagcaacgttaccatgcagttcggcagtaagccgctgttcgaaaacatttccgtcaaatttggcggcggcaaccgttacggcctgatcggcgccaacggtagcggaaagtccacttttatgaaaatcctcggcggcgacctggagccgacgctgggcaatgtttccctcgatccgaatgagcgcatcggtaagctgcgtcaggaccagttcgcttttgaaacattcaccgtacttgatactgtcattatggggcatggcgaactgtgggaagtcaagcaggagcgcgaccgtatctacgccttgccggaaatgagcgaagaagacggctataaagtcgccgatctggaagtaaaatacggcgagatggacggttattccgctgaggcgcgcgcgggcgaactgctgttgggggtgggcatcccgctggagcagcattacggtctgatgagtgaagtcgcgccaggctggaaattacgtgtgctgctggcgcaggcgttattctctaatccggacatcctgttgctcgacgaaccgaccaacaacctggatattgatactatccgttggctggagcaggtgctgaacgagcgcgacagcacgatgatcatcatttcgcacgaccgtcacttcctgaacatggtttgtacgcatatggcggatctggattatggcgacttgcgcgtctatccgggtaactatgatgagtatatgacggcggcgacccaggcgcgtgaacgtctgttggccgataatgcgaagaaaaaagcgcaaattgccgagctgcaatcttttgttagccgttttagcgccaatgcctctaaatcgcgtcaggcaacgtcgcgcgcgcggcagattgataaaatcaagctggaagaggtgaaagcctccagccgtcagaacccgttcatccgttttgagcaggataaaaaactgttccgtaacgctctggaagtggaggcgctgacgaaaggttttgataacggtccgctgtttaaaaatgtcaatttgctgctcgaagtcggcgagaagctggcggtactcggcaccaatggcgtgggtaaatctacgctgctgaagacgctggttggcgatctggacgccgatcacggcaccgttaaatggtcggaaaacgcgcgtattggttactacgcgcaggaccacgaatatgaattcgaaaatgacctgacggtgtttgaatggatgagtcagtggaaacaggaaggcgacgacgagcaggcagtgcgcagtattctgggccgcctgctatttagccaggatgatatcaaaaagcctgccaaagtcctctccggtggcgagaagggccgtatgctgttcggcaaactgatgatgcaaaagccgaatatcctgatcatggacgaaccgactaaccacctggatatggagtcgatcgaatcgctgaatatggcgctggaactgtatcagggcacgctgatctttgtttcgcacgaccgtgagttcgtcagctcgctggcaacccgcgtcattgaaattacgccggagcgcgtggtggacttcagcggcaactacgacgattatttgcgtagtaaagggatcgagtaagttattgtctgtaaccccgatagcgtcggggttacagaatgttaacaaggtaatttttattttttccgaatgcaatgtgaaaattatatatactcttagagcctatcccattagggctattttacttgccattttggacctgggcagtgctcgccaaaacgcgttagcgttttgaacgccgctagcggcggcccgaagggcgagcgtagcgagtcaaacctcacgtactacgtgtacgctccggtttttgcgcgctgtccgtgtccaaactggctgcgccaataacgcctggtgggataggctcttaatattctattttaaaattaaatgaaagaagaggatctatcataaaaattgcgaatatattttgtggtaaacatattgtaatgttattttctttataagaattcaagtgctattttatattcctttattgttcaacaaaaggaataaatatgagcattttggaacgcttttttggccgtaaagaaaaaaactcatctaatatacaaggtgttttagtagcgaatgctgaagttgataacccactaagtttagttgttgtatttgatactctcccggaaaataattcaaaagaactcacccgcttgttgcgtaattatcattccagtatgaaacaggcaacgtgtgaacttgtccctgaactggatttttttggtttagcaggatggggtaagcatgtaatatcgatggttggatttaaaacgccttaccctcaggaatcaatcgaacaatgcgtcgcgccagctcattatccccaggaagtaaaagagcaagtacgggcaaccagtgcaaatattattttatattataaggggtatgatacttcacctttagagcaatatgttgcgttggctgtggttgcaggtgcattaagtaacatgggggctgtcgctgtattaaatgaatcggctcacacttcattacctgcgggggtatttaagtctcaggagttgggtaagcatagtctggaaatgttgcgtgaaggtttcccgctgacctctctattttgtggatttgtgaaatatgaagttgaggatatcgaaggcgtatggatgcgtacctatggtgctgattgctttgggctaccagatttcgcagcacacgcacaaggtcatcacgaagggcaaaaatattctgatattttcaataatgttctgcgttacctgcttgaaagtggagcagaaatggctgccgggcataccatgcaagtcggtaaaacgacatttatgaaactgcgcgatccccttgacgatgaatattacttacaggggcctggaaccacattagtggttgaactgattgaagaagatgagtgtaatgctcattgagaaatcggggtaattgccccgactctcgttaaagtgtaaacggcactttattttccagcaccgcctgaatcacattcagtgcgccttcatgcttattattatcggtagcgtaacgggcgatttgtttaattttttctgcggcattgtccatcgcaaaggaataatgcgccatttttagcatctctgcgtcattgccgctgtcgccaatcgctaccatattttgtggcggcagatcccagcgtttcagtaaccgcgaaataccgtttgctttatgcaggccgggaataatcagatcgataaaaccgaagccgctggtgacgggcttcataatgccatcgagcgtaacgtgtagtttgtcgatcactaacgggatttgttcatccggtaggttgagcgaaaacttgaacagtacgtcatcaatctcctgataatcttttacgggtttcaggcgatggtagtgttttgccatcagggtaacgaatgcttctggcgcattttcgctgacatatgcactttgcagaccgcaggcgacaaaattaagttgcttatctttcagcaactcgccaataataatccgcgattcatgtcgggtcagttcgccgtggaacagttgcttgccatgttcgtaaaccagtgcgccgttttccgcgacaaaagagatcgcatcctttagctcaggaaagaacgaaataagctggtaatactgattaccgctggcgacaacgaactcaatgccgcgctttttcagttcctgaaattacgccggagcgcgtggtggacttcagcggcaactacgacgattatttgcgtagtaaagggattgaaagctaaacactgacgcccggtggcgttgtgtttaccgggcctacgtatcctggcgcgtaggtccggtaagacgggtgcgcccagacaaagggcgcaccgcagttaagcgggcagggcggtacgaccgtcaaacatctatacctaatgcccgtttaccgtgaatattcagatcgcgcagcgtgaagcgcccttcccaggtggtttcatagtcctcgcgcgggaaatcgcccggtgatgcgcctgtctccagcgccgctttcaccttacgcgcataggccagatttttctcacacattggcgcggcaggaatgtacatcacattgccccagccctgctgattttcgacgggggcgacggagtggatgacatcgcaatgccaccacacggaatccccggcttccagcggcggaatgctggttaacgccgccatcagtaaaggatgccactgttcagaaatcggcagcacccggcccggcgcgacgccgcataattcatcttccgggacatcatccagcagcgggcgcagcagaatatacgccatcgcctccgggatagggacgacatgaagcaacccctgaccgggcagcatatcggagagcgcggtccagccctggaaggtgcgaaataccgagcattttgtggtgttatccaccgtgtactcttcaacgtcggtacggtgcgccgcattccacggatcgtactgctcgacgttgccgttaaacacgctggcgaatacctgctgataggctggcagcagccagcgttccagcgcgccggagtcggtatgcgcccccagtcctttggatgtggtgcccggcgggcggcggcggatgcgatccgggtaaataatgctgatatccggattaaaccatcgcttgccgtcgtgctctacctgccatagacggttgaggaacgactgcgccagcgccatctcttcactttggcgggcctgcatttgcgcctgcgaccagtagacaggatagatttcaggccgggaggcgctcagcgtaccgaaaaaattatcccccggtcctttatacacctcgtcaaaatggttcttgtccagataatcgagcatcgactggtcccatgccagcgcctgttcgcgtggaaaatgacctttaatcaccgcgcacccgcggcgcttaacctcggcgcgggtggcatcgctaatgttgcccatcgccagttcgctaaaagggataattggccataccggctgcccctgcgccttcagatcgttaatttccgccacccgggctgctatggtggcgctcaaacggtcgaacaccgcctgtacgtcgccgatttgcgcgcgtagcgcctgcttcatctgacgaatggccgcttttgggtcggcgggcagcgtttcgtgggtaaaaggagtcgtcatatcaacctcatcatctttcgttcgaaagtaaaattagttacatctgatactttaagttaaaataaggttaatgcaagtttaaaatattgcaggagcgcacaaggagagaagcgagaggaaaacgtaaggtggccaggacgccttaatgtcttatgcggctattcctttcgttcagccacttttcattcgaaataaatttgtggttctgctcacattgttattaaaatgtttctggtcgcagttacagccaggagcttaagtatgaccgttaacgttgtcgttacagatatggacggcacttttctcgacgatgccaagcagtacgatcgtgtacgcttcatggcgcaataccaggaactgaaaaaacgtaatatcgaatttgtggtcgccagcggtaatcagtactatcagttgatctccttcttccccgagctgaaagacgaaatttcctttgtcgcagaaaatggcgcgctggtgtatgaacatggcaagcagttgtttcacggggagctaacccggcatgaatcgcggattgtgattggcgaactgctgaaggataagcagcttaacttcgtcgcctgcggtctgaaaagcgcttatgtcagcaaaaacgctcccgagactttcgtggcgctgatggccaaacattatcaccgcctgcagccggtaaacgattatcacgacattgacgatatcctgtttaagttctccctgaatttgcccgatgaacaaattccgctggttatcgacaaactgcacgtatctctggatggcatcatgaagcccgtcaccagcggcttcggttttatcgacctgattatcccgggactgcataaagcgaatggcatcagtcgtctgttaaagcgctggaacaggtcgccacagaatgtcgtcgccattggcgacagcggtaatgatgcggaaatgttgaaaatggcgcattactcttttgccatgggcaatgccgcagacaatatcaaagcgctttcacgttatcacactgatgataataaccatcaaggcgcgctcaacgtcattcaggccgtgcttgacggcaccgatcccttctgattaacaggcctgcgtaggcctgttaaacgtagcgccatcaggcagttcggacatattgccgatggcgccagggtaaattacagcatatgttcggtacgggcgatgatatcgtcctgcgcatccggcgacagcgcggtgaagaaggcggagtagcctgccacacgcacgaccagatcgcggtactggtctggatgttttttcgcatccaacagcgtttcgcgtgacacgatgttgtactgaatatgccagcctttatgcacctcaaagaacgtccgtagcagaaccatcagtttctgtttgtcggattcgttttccagcgtcgttgggttcagtttctggttgagcagcacgccgccgagaatggaaccggtaggtaatttgcctacggaaccaatcaccgccgtcgggccgagatgatccgtacctgatgcagggcttgcgccttccgccagcggtgtatgcgctttgcgaccatccggggtagccatagtcgcggcgccaaatggcacgtttgctgagatagaggacgtaccggcgtaatagttgccgccgacagggccacgaccgtagcgcgggttatgatattgcttcagctcatcaatataggtctgataagcgcgcgccagcagcgtatcgacggtatcatcgtcgttaccgtacttcggcgcgccgttaatcagacgctggcgcagctgctcatgggtcagcccgtcaaagtcatcggccagcgcggcggcaagctgctgttgaccgataacgccctgttcgaagaccagttttttcacagcggcgaggctgttgcccaggttggcgataccgacctggagaccggatacccagtcatatttcgcgccgccttgcttgatacttttcgctcgctcaatacagtcatctaccagcgctgagcagaggatatcgtggacgttctcttccaacatggtgtcgaccacatactcaatttcaatcgatttgcgcgtgtagtagcgaatttgggtatcccaggcggccatcacttcgtcaaaattgttaaagttgcctgcggagagcgccttttcctgcggcagaaataccttgccgctggtggcgtcgcgaccgccttccagcgccgccagcatgacgcgggcgaagttaataaagctcatgccggtgcagcgataaccccatttcccgccgacggcggtttcgatacagccgatcgccgcataatcgtaagcgtcctgcggttcgatccccaacttgataaattccgggatgacgatttcatcattgttaaacgccggcatcccaaagccgcagcggatgacctggacgcaggcgtcaaggaaatcgttactcattccggcgtgataacgcacactgaggttgggctgggtagaacgcagacgtccacaggactccagaatggcgtaagacagcggattcactgcatccattggctgaccgttgataagtttctgaccgccaatggtgacgttttgatacagcgggctgcccgcggaggctttagagtgcgaaccggagcggatcttgtttacttccagcagtttcagccagcagctgtgcagcagttcaatggcgtgctcacgatccagcgtctggtttagttcgacatcgcgacgataataggggtaaagatactggtccatacgaccaaatgacaccgagtgaccgttagactcaatttgtagaatcagttggatgaagtagcacaattgcagtgcttgccagaaggtctgcggcggttggtgggcgatcacctcgcagttttcggcgatggtaagtagctctttacgacggctttcacgggactcttcgcccgccatctggcgcgccagcgcggcaaagcgcgtgatatgctggcttaccgcgtccagcacaatatcaatcgccttcaggaactgctcgccatgcagatcttccagcacggtcaggttgatgcgtgagcggcgctcggcgactttatcgcgcaggccataaagccctttttccagcagcagcgggaagttcaccgccaggtgcgcatcgccggaagtcatattgccttcggctttgataatgccagtcgccagaagccctttttgttcatcggtaaacatgccgtagcagcgatcctggacggtttgaccgcgccaccacggacagacgtcgtgcagaatacgtttgttttcttcacttacggaaaaacctgcgccgggccggtccgccaggtcgtcgatctctttttcaatccacgagacggtatattccgggaaaatcggcgcggcgcggacttcacttgcctggttgccgacgatcagttcatcgtgttttatccagatagtgcgttccgccaggtgatgggccagcgccagcgcacggcgtaccggaatcggtttatccagatgctgctggtacatttcggtataatgctgcgcgcgctcggtacagaccggcggtttcacgatatgtaccagcgcggttttgtgcgccttaatgcggtcactgagcgtgtccagtttcagttgggtcatgataattatcctcgtagggtcgcggttaaacctttttggcaggcgtacttctgggcaaaatcaagtaacgccggcgcatccagtggtttatccggggcatgatagggttgactgagtaagtggtatttattgatgcccagcgtgtggtagggcagaaaatgaatttccccgacgtgcagttcgtcggcggcaaagtcggtaatggctttaatggcctcctcatcggcattaaatccctgaatcagcgggacgcgaatcaccatttttttgcccgcggcggcgagtttcctgagattttccagcacccgcgaggcgctgccatcggtccactgcttaaacggcccgtcggcgacatgcttcaaatcagccagaaacagatcgatataaggcagtgagggcgcaatgtatttccatgggacatgcagacaggtctcaaccgcagtatgaataccggcgtcatggctggctttaaacagctctgccgccagttccggctgcataaacggttcgccgccggaaagcgtaagaccgccgccgctgcgatcgtaaaaaggtttatcgcgcagtaccgtcgccatgatctcatccacgctttttatttcgccgcacacggttaacgcctgtgtggggcagcaatgcgccaggatggaaaaatgggcgtcggtcagtttctcgcgatggatgagcaggccgtttagcgcgcgctcaatgacgtccggcgcggcttgcgcgcacaggtcgcatccttcgagacacagccgcgcgtcgtataacagatcctgagcgcgggcgcggctttccgggttctggcaccagcgacagcccaacgaacagcctttgagaaatactacggtacggataccggggccatcgtgggtagaatagcgctgaatattgaagatcataaacggcctctcttatttcatataaagattaaattactttcgaatgaaagctatcttgatgtgcgtcaacgaatggagaggttctgacaaagaggcgttaaatgaggtacaacatcacggtttgaggttgtggtatggcgtttaagatgatgccgcgctgcttgagccgatcgtcagtcggagcttgggtaagctggctttgcgtctgatgacagtaattatctgttgatacagcacggccataaaccgtgctttggtatgtttatccgtaaagtggctactgcccgcagacctcacagccggggttgcgcattaacttcatttcgcggaactgacaggtcatcgcatcgtacatgacgatttttccgctggcaggctgaccgtaatgcgccagtagcttaatggcctccattgcctgtagcgaaccgatcacgccaatcagcggcgccatcacccctgcctctacgcaggtcagagcgttttcgccaaacagacggctcaggcagcggtaacagggttcgttttcccgatacgtaaagacggtaacttgtccttccatacgaatggccgcgccggagattagcggcactttcgcggtatagcacccggcgttaagttgattacgtacgctaacgttatcggtacagtccagcaccagcgaatgcccggcaatcaggctggtcatagcgtcgtcgtccagccgcgcgttaacgggcgtaatggtaatatgtgggttgatacgcgccagcgcgtcgcgggcggactctaccttcggctgcccgaccgtggcgtcgctgtgcaaggtttgacgctggagattggaaacggaaacggtatcaaaatcgagtagcgtcagttgcccgacgccagcgccagccagatactgcgttgccgcgcagccgagcccgcccagcccgaccactaatacccgcgcatcttttaacgcttcctgcccttcaaaatcgaagccgcgcagaataatttgtcggttatagcgcagcatctcctggtcgctaagttccgccattacaggcctccgaacagagcattaaacggctcgacttccacccattctcccggctcaacattgccgcgttcacgctccagcacaataaagcagttgcccagactaaacgagctgaaaatatgtgaaccctggtgtccggtggtcgtgacctccagttcgccgttggcgctacgttgcagaatgccgcgctggaaatcgagacgccccggcgttttcttcaggcgagatgctgtgcgtacacgctggcgcggcggcactgcgcttgccgtgttgccgccaagcttcgccagtaagggctgaaccagttgataaaacgtgagcgccgcagagactggattccccggcaggccacagaaccagctattactgagcttgccgaaggcaaacggtttgcctggcttgatagccagcttccagaaggcgatttcgcccagctcctcaaggatggttttggtatagtccgcttcaccaaccgagacgccgccggagcttatcactacatcggcctggctgtcggcgtcgataaacgcggcgcgaagcttaccgggatcgtcaggaataatgcctaaattgatcacttcgcagccaagctgttgcagcatcaaatgtatagttagacggttagtgtcataaatttgtcccgcctccagcggctggcccggaagctggagctcgtcgccggtcgagaacagcgctacgcgcactttacgtacaacctgcgcatcggcaattcccagcgacgccagcactggcagttcggcagtagtcaggcgcgtaccggccggaaagaccaccgcatcctggcgaatatcctcgccgcggcggcggatgttttgtccgcaacgaacatcggcggtaaaacgcacgccgtcatcggtttgttccgtctgctcttgcatgactaccgcctcgcaacctgccggtaccggggcgccggtcataatgcgaatgcaggttcccgcaggccactctccctggtagggctgaccggcaaatgctttgccggcgacgggcagcggcttatcggcggacaaatccgccacacgtaccgcataaccatccatagctgaattatcaaagccggggacatcaaggggagatacgatatcggtcgccaggatgcggccaaagcagttcaccagcggcaacgtttctacggcggtgagaggggtaatacgtgaaagcatctgggtcagcgccgtttcaagcggcatcaatccggcggaaaattccatgaacatactcctgcgaggcaaaatcgaatccggctattatgtcagaaaacagtggcgggcagtatgctacctcggtcttagagacggccttgcgcctttacataccttacgcatctttctatattcaaaaatcgaatgaataactcacaacaattctgatagttatagtaaaagttgtgtgccaccgtaatggaccctaaaaatgaataaagcagtgattgcgattcacggcggcgcaggcgcgattgctcgcgcgcaaatgagccatgagcaggagctacgctatatccaggcgttgtcagagattgttgaaagcgggcaaaagatgctggaagcgggtgacagcgcgcttgatgtagtgacggaagcggtgcgcctgctggaagcgtgtccgctcttcaatgcgggtatcggcgcggtctatacccgagacgggactcatgaactggatgcctgcgtgatggacggcaataccctgaaagccggagccgtcgcgggcgtgagtcatgttcgccatcctgtgctcgctgccaggctggtgatggagcgcagcccgcatgtactcatggtgggggaaggggcggaaaactttgccttttcacaggggatggcgcgcgtttcgccggatatcttttccaccccggcgcgttacgagcaattgctggcggcgcgtgcggcgggtgaaatggcgctcgatcacagcggcgcgccgctggacgaaacgaaaaaaatgggtacagtcggcgcggtggcgcgggataaattcggcaatctggcggcggcaacgtctaccggcgggatgaccaataaattgcccgggcgcgtcggcgacagcccgctggtcggcgccgggtgttatgccaacaacgccagcgtcgccgtttcctgtaccggaacgggagaggtctttattcgcacgctcgcggcttacgatatcgccgcattgatggaatatggcggactcagccttgccgacgcctgtgagcgcgtggtgatggaaaaattaccggcgctgggcggcagcggtggattaatcgccgttgatcacgaaggtaatgtcgcgttgccgtttaacagcgaagggatgtatcgcgcctggggatatgccggggatacgccgaccacaggaatttaccgggaataaggagccgcaggtgccgcacagcgatgaactggatagccgcgatgttctgtccgtcagtggcctgaatatcgcgtttcaccacgaagggcaacaggtagacgccgtgcgtaatgtgtcattacgcctgaagcgtggagagactctggcgattgtcggcgagtcgggatcgggaaaatcggtgacggcgctggcgttaatgcggctgattgagcagtcgggcgcgaacgtgcgctgcggcgaaatgctgttgcgtcggcgtaatcgtcaggtgattgagctgtctgagcagagtgacgcgcagatgcggcgtgtgcgcggcgcggatatcgccatgattttccaggagccaatgacctcgctcaacccggtatttaccgttggcgagcaaattgccgaatctattcgtttgcatcagggggccagccacgaagaggcgctggcggaagcgaaacgtatgctcgatcaggtacggatcccggagtcgcaggcgattttatcgcgttatccgcatcagctttccggcgggatgcgccagcgagtcatgatcgcgatggcgctatcctgccgtccggcggtattgattgccgatgaacccaccacggcgctggatgtcactatccaggcgcaaattctgcaacttatcaaagtgttgcagcaagagatgtcgatgggcgtgatttttatcacccacgacatgggcgtcgtggcggatatcgccgatcgcgtgctggtgatgtatcagggcgaggccgtggaaaccggcagcgtagagcagattttccatgcgccgacgcatccttatacccaaacgttactggccgccgtccctcagcttggcgcgatgcgaggccactcgctgccacgccgtttcccgttgatttccgctgacgaaccggccctttatgaatcgcagattgagcaagacacggtggtggaaggcgaacctattctccaggttcgggggctggtgacgcgattcccgctgcgtagcggtctctttaaccgcgttacgcgtgaagttcatgccgttgagaatatcagtttcgatctctggcccggcgaaacgttatcgctggtgggcgagtccggtagcggaaaatcgacgaccggacgcgcgctgctgcggttggttgaatcccggcagggggagattatctttaacggccagcgcattgacacgctgtctgcgggtaaactccagccgttgcgccgcgatattcagtgtattttccaggacccttacgcctcgctcgacccgcgccagaccgtggggtattccattatggaacctttacggattcatggcctggggcagggggacgctgcggcaaagcgcgtggcctggttgcttgagcgtgtcggattacgtcctgaacatgcctggcgttatccgcacgagttttccggcggtcaacgtcagcgcatctgcatagctcgcgcgctggcattgaatcctaaagtgattattgccgatgaggcggtctccgcgctggatgtttccgttcgcgggcagatcattaatttactgctcgatttacaacgggaaatggggatcgcctacctgtttatttcgcatgatatggcggtcgtggagcgaattagccatcgcgtggcggtgatgtatcttggtcaaattgttgagatggggccgcggcgcgccgtttttgaaaatccgcagcatccttatacgcgtaaattgatggcggcggtgccggttgccgatccctccagacaccggccgcggcgcgttctgctatcagatgatatacccagcaatattcataaacgtggcgaagagacgcccgccgtttcattacagttggtcgggccgggacattatgttgcgcggccgctgcaggataatgcgctctcgcgcttataacattcagacaggcagggtttcaggagaacaacatgacgcaatttattacgcataaatggctggcggcgctgggactggcctcatccattgcggcttttccggccctggcggccaaagatgtggtggtggcggtagggtctaatttcaccacgctcgatccgtatgacgccaacgatacactctcgcaggcggtggcgaagtcattttatcaggggctgtttggcctggataaagacatgaaggtaaaaaacgtcctggcggaaggctataccgtttctgatgacggtctgacctacaccattaccctacggcagggggtgaaatttcaggacggcgcggattttaatgcggcggcggtaaaagcgaatctcgatcgcgccagcaatccggataaccacctcaagcgttataacctgtataaaaatatcgcaaaaacggaggttgtcgatccggcaacggtaaaaattaccctgaaacagccgttctccgctttcattaatattctggcgcacccggcgacggcgatgatctcgccgcaagcgctggaaaaatatggcaaggatattggttttcatccggtcggtaccggtccataccagcttgaaacctggaatcagaccgactttgtcaaagtgaaaaagttcgccggttactggcagcagggcttacccaagctggattctattacctggcgtccggttactgacaacaatacccgcgcggcgatgctgcaaaccggcgaagcgcaatttgcttttcctatcccttatgagcaggccgcgttactggcgaaaaataaaaacctcgaactggtcgccagcccgtccattatgcagcgttatatcagtatgaatgtgacgcagaagccgtttgataatcctaaggtgcgtgaggcgttgaattacgctatcaatcgtcaggcgctggttaaagtggcgtttgccggatacgccacgccggcgacgggcgtggtgccgccgtcgatagcctatgcgcaaagctatcagccgtggccctatgatccggctaaagcgcgcgaactgttgaaagaggcggggtatccagacggtttcagtaccacgctgtggtcatcgcacaaccatagcaccgcgcaaaaagtgttgcagtttacccaacagcaactggcgcagattggcgttaaagcccggataaccgcgatggacgccggccagcgcgccgcggaagtcgagggcaaagggcaaaaagagagcggcgtgcgaatgttctatacaggctggtcggcgtcgacgggcgaagctgactgggcgttatcgccgctcttcgcatcacaaaactggccgccgacgcagtttaataccgctttttacagcaacaagcaggtcgacagcgatttggcggcggccttaaagaccaacgatccgcaggagaaaacacgattgtacaaagaggcgcaggatattatctggaaagagtcgccctggataccgttggtggtggagaaattggtttctgcgcacagtaaaaatttgaccggtttctggattatgccggataccggtttcagctttgacgatgcggatttgaagtaagtaatgcgatggggctggatggcgcgcgcgttgtccgccatccggtaaaaggttcgtgtgatgcttaactatgttctcaagcgcctgctgggattaattcctacgctgttgattgtggcagtgctggtgtttttatttgttcatttgttgcccggcgacccggcgcggctgatagccggaccggaagccgacgcgcaggtgatcgcgctggttcgtcagcagctggggcttgatcagccgcttcatgtccagttttggcattacatcacccatgttttacaaggcgatttcgggacgtcaatggtttcccgccgcccggtttctgaggagatcgccagccgctttttgccgacgctgtggctgacgataaccagtatgatatgggcggtgctgtttggcatggcgatcggcatcgccgccgccgtgtggcgtaatcgctggcctgaccggttaggaatgacgcttgccgtgaccggcatttcttttccggcttttgcgctgggaatgttgttaatgcagattttttccgtggatctgggctggctaccgaccgtgggggcggatagctggcaacattatattttaccctccctgacgcttggcgcggcggtggcatccgtcatggcgcgttttacgcgctcctcgtttgtcgatgtcctgagcgaggattacatgaggaccgcgcgggcgaaaggcgtcagtgaaacgtgggtggtgttaaaacatggcctgcgcaatgcaatgatcccggtcgtcaccatgatgggactgcaatttggctttttgcttggcggctcgatcgtcgttgaaaaagtgtttaactggccggggcttgggcgattactggtcgactccgtcgacatgcgcgactaccccgtgattcaggcagaagtgctgctgttttctctggaatttattcttatcaacttagtggtggatgttctctatgccgccattaatccggctatcaggtataagtaaggatgcgattatttaactggcgccgtcaggcgattttacatgctatgccggtggtaaaacccgaccagatacgcacgccgtggcgggagttctggcgtcgttttcgccgccagcatgtcgcgttggtcgccgggggattcgtactggcgttaattctggtggcgatttttgcccgttggctgacgccctacgatgcggaaaactattttgactacgatagcctgaacaatggcccctctttgcagcactggtttggcgttgactcgctgggaagagacatctttagccgggttctcgttggggcgcagatctcactggcggcgggcgtgttcgcggtatttatcggcgcgataatcggtacggtgttgggattgctggcgggatattatgaaggctggtgggatcgttttattatgcgcatttgcgatgtgctgttcgccttccccggcattttgctggcgattgccgttgtggcggtgttaggcagcggtattgctaatgtgatcgttgcggtggcgattttctctattccggcgtttgctcgtctggtgcgcggaaataccctggtcttaaaacagcagacgtttattgagtctgcccgcagtatcggcgccagcgacacgacgattttgtttagccatatattgccgggaacggtctcgtcaattgtggttttctttacgatgcgtatcggtacgtcaattatttccgcggcaagcctgtcatttctcggattaggcgcgcagccgccaacgccggagtggggagcgatgctcaatgaagcgcgggcggatatggtcatcgcgccgcacgtagcgctcttcccggcggtggcgattttcctgactgtgctggcgtttaacctgttaggcgacgggttgcgcgatgcgctggacccgaagattaaggggtaagccagcccggtggcgttgacgcctggcgggcctggaacgggctcgtcaggcgggataacacatccggcacccgcgccgggggaggtggcgttaaacccgactgccccacaaatcatattcgtcggcgttttccactttcacgcgcacgatatcgcccggcttgacgttggtttcgccgttcaaatagaccgcgccgtcaatttccggcgcatccgccatgctacgcccgatagcgccttcttcgtcaacctcatcaacgatcaccagaatttcgcggcccactttttcctgcaagcgctcagcggagatttgctgttgcagttgcataaagcggttccagcgctcttctttcacctcttccggcacctgatccggcagctcattcgcgcctgcgccttccaccgggctgtacttgaagcagcctacacgatcgaggcgcgcctctttcaggaagtcgagcagcatctggaagtcttcttccgtttcggcggggaagccgacaataaaggtggagcgtagggtcagttccgggcagatttcgcgccactgcttaatgcgcgccagctggcggtcaacggaaccgggacgtttcatcagtttaagaatccgcgggctggcatgttgcagcggaatgtccagataaggcaggattttgccttccgccattagcggaatcacatcatcaacgtgtgggtaggggtagacgtagtgcagacgtgtccagacgcccagttttgataactgttcgcacaggctcaccatactggttttcaccggttcgccattatggaatccggtgcggtgcttcacatctacgccgtaggcggaggtatcttgcgaaatcaccagaatctctttgaccccggcatcaaccagacgtttcgcttcgcttaatacgtcgccaatcgggcggctgaccagatccccgcgcatcgacgggatgatgcagaacgtgcagcggtgattacagccttcagaaattttcagatacgcataatggcgcggcgtcagttttacaccctgttccggtacgaggcttaaaaatggattgtgcttcggcttcggtacgtaatgatgtacgtgctgcagaacttgctcatagctatgcggcccggtgatttccagtactttcggatgcacttcgcggatctgatcttcttttgcgcccaggcagccggtgacgattaccttaccgttttcgttcagcgcttcgccaatggcttccagtgactcttgtaccgcgctgtcaataaagccacaggtattaacgataaccatatccgcatcgtcatagcgtggcacaacgtcatagccttcggtacgcagctcagtcaggatgcgttccgaatcaacgaggtttttcggacagcccagggaaacgaagccgatctttggctggtgggttacattactcatagcttaaaaagtgttcatttattggaatggtcagggcagggattctacagatatccgaacaaaaattgtatcgcaatctcatcaggagcggcggcatcaaccgttgtggttatcagcaaaaggtgaaaaagggcaattctaagaaaattcttgatctctgacacccctttgtctaaaaaacgaccatactattaagttgaaccctggtagaaaagaggaggaaaaaaggtatggtcgttgacagactgagaaccgatcttctcaacaagctgataaacgcgcgtatcgatcttgccgcttatctgcaattgcgaaaagcgaaggggtatatgtcagtcagcgaaagtgacactctgcgtgacaatttttttgaactgaatcgcgagctccacgatcacgctttacggcagggactgcatctcgatcaggaagagtggaacgcgctgcgccgtgccgaaggcgcgcttgcagccgccgccgtttgtttaatgagcggacaccatgattgtccgacctttattgccgtcaacgcagataaacttgaaaactgtctgacaactttgacgctgagtattcagagtctgaaagcacattcaccgcttacacaggtctgaacaaggggaggcgactcctgaggaatccccagcaaaccaagacaggcatagtgttatgtgatctaattgattgcgctaacactttcaaggaaatcatcactatgcctgctcgttcattatgccaaaaatcctttaaaaatatactggagcctttgcacctttaccgccgtcaatctctgattgaggctaccagtgtagtgattaacggtgcatctcttacacttattcagtattgggcgtgatttgtcaggagtagcatcggtcaggcacaagataaaacgtatcgatcgacttcggggaaagtctcacttgcagaatgaagtttcagatactttttcagcgtgttactaaaaaatcacggagggaatgacccgggttgtcatgctctcctatatgccagcctgttttccgccaaaggtgactaaattcggttcaccagacaatcgttgatgttcttagggaacggtatagtcgaattcactcctgaaacaggtacggaatgtcggccgtttactattctgaaacgttatttatatcaaataattaaattttatttttatctttgttattgtaacaataaattacatgtttctttctgttatcagcgaacctgaaccaattttaatggggggttagataaaagctaattcagaaaattatttttttaagatatattgaattatcagatgctccattcaaatgagagacgagaatgcaaacgttagaacggttttttcttttcgttacgggggaccaacctgaacgatttgaaaaagcaaatagcagttgtgctgatagcgtaatccttgatttagaaaatgcggtgtcatctgagaaaaaaataattgccagagaaaatgctctgaatttcatgagtaatgatgaaaaagtactgattgctgtacgtgcaaaaattgtaataacttcacgcctggctggatcatatccttctgttgacggtatcacaactgaatttatgaaaaacgagttgacaatacaaaatgctattcactcctgtaaaatggggttcagtggcaaggtatgtattcaccctccacaaatttcacatgtaaacagagcattcagctatttaaaacaagaaatcgagtgggttccccagattatgcgactggctcaatatccccatggagcgttcagtcatgaagggcaaatggtggataaaccgttactggaaaaagcaaaaaggattttggctcatagcatttagtaaatatatgaaggagtcaccaatgaaagctttagtttgtgtaaaacaagttgtcgatcataacgttagaattagaataaagcgagatcattctgatgttgatatttctgattcaaaactcagtatcaatccatttgatgaaattgcagttgaagaagcagtacgtttaaaagaacggggattaatcagtgaggttgttgtagtgtctataggaaacacaggtgtaggggatgtattgcgtacagcactggcagcaggggcagacagggcaatacacatattaacaaaaaactctcttacaccactaattgtggccaaaactatcaccgctattacccggaatgaaaaacccgatattatattattaggcaagcaagctattgacgatgattgtaatcaggtaggccaaatgctggcagcattactcgatcttccccaagccactaatgttagtgaaattactatttctgataattcattaactgctgttcgtgaggttgatggaggattagaaacgttaaatttatccctgcctgcagtactcactacagatctacgtctgaatacaccgaggaatatcagcttgccgaatgttattaaagccaaaaagaaacctgttaaggagatagatttcgattcacttggtattaacccgtcatccagattgactattattaaagttgatgagccagcaagaaggaaagcaggcataatcgttccagatattaacacgctgctagataaattaaaaaacgaagaaaaagtaatttaaggaggaaaatatggcttctttagttattgctgaacataacggcaatactcttttaccttcaacactcagtactatcactgcggcaaaagccattaatagtgatatagatatacttatgttaggatatggtatagaaagtattgcagttaaagccagtcatattcaggggatatccactgtatttgttgctgacagcccactattcgaacaccttctggcagagaatgtggaaaaacagatcagctattttttgaatagtgggaaaaatcattatcagtccattctttttcctgcaagctcttttggaaaaaactgtgcgccacgcttagcagcaaaacttgatgtatctcagattagtgatattacgcgtgtcattgatcaacatacctttgaacgtccaatctatgcgggtaacgctattgccacagtacacagtgatgatgaatataaagtgataactgttcgtcctacctcatttgcggctgcggttgcggaagatgagggaaaagcccccattgaatttacagaggttgttcttggttcagatcaggtaaaatttattagccaacatgttaataaaagtaaccgtccagacttacaatccgccagagttgtagtatcaggtggacgaggagtaggaagtgcacaggcattcaaagaacttgttgataacctggcagataaattaggcgctgccgtgggggcaagccgggctgctgtagatgctggttatgcaccaaatgattatcagattggccagaccggaaaaatcgttgcgcctcaactttatattgctctgggaatttctggcgccatacaacatcttgccgggatgaaagagtcaggcgtcattgtcgctattaataaggatcctgacgctcctatcttttctattgcggattatggtttggtagctgatattttcaaagctgtacctgaacttatcgataaattataaatcatattttttcctccttaaaggtaacttttatgcaatatactgatattcaaatttggcagcctggcattctgcgcaacaccgattatcttaaccccggtcccgctaagctgctggccgccactctggataaagacatcaaaatctttaaagagggggggcgttctgccagaattatggcactggctctattttcttcctgtcgaccgccagtcagatctatctgctgatggtcatccgataaaaggtcattttctaccccctgttggcgctggtttattgaggaaaaaattatgaaaagtattgaaaaggataaatatcaggatattcgtgatgcggttcgttcattatgtagtgaatttgatgataaatatcaccgtaagatagatgaagcaaaagcctatcctgaagagtttgttaataaactaaccaaagctggttggctggctgcgctcatcccggaggaatttggagggtcagggcttggtttaactgaagcatctattatcatggaagagatcaatagatcgggtggaaactctggagcctgccatggtcagatgtataacatgaatacgttgttacgtcatggatccgataaacagaaagaattctggctgccacggatagctactggtgaatggcgcctgcagtcgatgggcgtcacagaacccacagcaggtacagataccaccagaattaaaactacagctgtaaaaagagaagaccggtatgtgataaacggacaaaaagtctggatttcacgtgttcaacattcagactggatgattcttctggttcgaactactccgcttgcaaatgtaaaacgtaaatccgaagggatgtctattttcatggttgatattaaagaagctatgaaaaatggaatgacagtacgacctattcccaatatggtcaatcatgaaaccaacgagctcttttttgacaacctggaaattcccgaagaaaatcttattggtgaagagggtatgggttttcattacatacttgatggtttaaatgcagagcgtaccttgattgcggcagaatgtataggcgatggatattggtttatggatcgtgttacccgctatacctgcgagcgtgaggtttttggtcgtcccattggtcagaaccagggggtgcagtttcctattgcagaagcatttattgcagtggaagcggctaatctgatgcgttttaaagcgtgcgagctttttgatcagcatcttgattgtggagcacaggctaatatggcgaaataccttgctgcgaaagccagctgggaagcagccaatgcctgcctgcaatttcatggtggatatggttttgcctgtgagtatgatatcgaacgaaagtttagagaaacacgtttatatcaggttgctcccatatctaccaacctgatcctgagctatatcgctgagcatgtgctggagatgccacgttcattctgatgtcaaatcaattggaaaaatattatgaaacagttacctctgtccggagtcattatagtctcgattgaacatgtcattgccactcccttctgtacccgacagttggctgattatttctcgcgggtaactataatagaatgccaagaaaacagggacttttcctgcaattatgatgaacggcttaaaaatgatttgtgtatattctttttcatctgagggagaaagctaaatataaatgttatggaatgcttcatcatcatcgacatttttttaatagttgataactggctatatagtcttataggcacctttttctaaggttgaacattcctataccatttcatctgttttatcactatgatatttatttcattggttacaatatgaatgcaattttatttacataatatagctgttcctacggtgctgaaaaattaaggagttaataatgaacgatacactttctaatacccagcaatcacgtgagacaatagaatgtgatgttcttattgtgggagcaggacccgccggattatctgcagctcttaaacttaaattacaggcaaatgacgcaggaaaagaactgtccattatcgtccttgataaaggagctgagcctggttctcatattctcagtggggcagtcatggatccccgagcgctgaatgaactaattcctgattggcaggaaagaggcgcacccattaaacagcctgttactcaggataaattactgttactgacgaatgaaaaatgtattaatttgccggatgcattgattcctgataattttcgcaaccatggaaactttatcgtaagcctcggtaatctcattaaatggctcgccggtcaggcagaaacgtcaggcgtggatatttatgcaggcttttcggcaactgagatactgtatgatcaggatactaacattatcggtgtagtaactggtgatatgggacgtcatcgggatggcagcaagaaagaggggttcctgagtggaatagaaattctggcaaaatatacaatttttgccgaaggggcccgcggtagtctggctaaagaactgatcaaaaaatttcatcttgatacaggcaaagcaccccagagttttagcataggcataaaagagttgtgggaggttccatcagaccagtcccatccggggcttgtaattcacaccacaggttggcctctggataaagagtcgttcgggggtgggtttctctatcatcttaatgataataaaattgcactaggtttggttgtgggacttgattattcaaatccctggttaagcccttttcaggaaatgcagcgcctgaaaacacacccttctatacgcaaatacattgaccggggtaagcgtattggttatggcgcaagagcaatcaataacggcgggattgcgtctatgcctgatccctgtttacctggtggtctgctgattggttgtaatgccggtacgctcaatgcaagtagaatcaagggtatccatacagctatcaaaagtggcatgatagcggctgacgctatatttaatgctttgctggacaacaggaaaaacgacatactgacagaatatcaaacattactgcgacagagctggctttggcaggaactggaaaatggtagtaatttcaaaccctggtttaaaaaagggcgtgtgataggttttattatgactggcattgagcattggctgcttccccgaatgggtataaaaaaaatcccctggcgtgtaaaaaataaccgaccggacaatatcactctgcaaccggccaacaaaagccagaaaaaactgtacgacaaacctgacggtaaactgacgtttgatattttgtcatccgtctatctcagtaacacctggcatgatgacgaccagccagtacatttgaaaatcagtgatcagaatatccctatatccattaatctggatatttatggtggccccgaagaacgatattgccctgccggagtatatgaatttttacaggatagtgaaacacaaaatatgcgtctgcaaataaattcacagaactgtattcactgtaaagtttgtgacattaaagatcctaaacaaaatataacctggactacgcctgaaggtggcaacggaccaaattatacagggatgtaacgctatcactcagtctgagctgtgagcatagtaaccagtttttgtgtgaagccgggtaatttgtcaaagcttctggcgcagatttgtaattttcttaatgaccaaaattcatcaagatcaataatcgaaaattcatgcaactgacgcaaacgggatgcagcagagtgaggcattataccaatgcccacttttgcttcaaccatacggcaaaatgtttcaaagttgccgacctgtattctaattttcagtttagatggtactagttctgccttttttcggataaattcaaacattcctgtcccttcaggcaggctgatttgttcatattgaattaattcatgaaaggtcacgctttttctgtcagcaaagggatggtctgtcgcggtgataagcactagcctatcagtacggaacggcagtatttcaagattatctgttgtaatattaccagcaacaattccgagatcagttttcccctcaataacagaacgtacaatttccggacttggatactccctgagatcaatattcacatcgttatatagtgtaaggaaatggcttaacaatggggggagatactctgcaatagcagttatactggaaaatattctgacatgtcctttgatgcctttaacatgctcctgcatatcgctacgtaacatttccatctgattcacaataaggctggcgtggtgtttaaatgtttcaccagcagaggataacgttatccccttgctactacgatacagcaatctcagattgatactctgttcaagattacgtatacgcacgctaccagatgcggcagacatgtaagttttttccgctccacgtgttatgctcccttcttcactgatagcaaggaataattttaaatcttttatatcaaagtgcatcgttgtggctcataattaacgtataatacagtgtgctgcttttttatagactcagtcagactgagtatttcggcctatccgaattcctgtcacgtcgagataactacaaaatgtaggctgacggtgtcaccgccctaccatgatccggggcggatctggtaggacgctggtgaccgctgacagggggtcaggtcagacatattgtcggaaccgttgtaacgtagatgctaatacctgctccccgtggtcatcaggttaacccgtttacagcggttttttcagccccggcagatttatcataaactgatcaccgtaaatatgtggaatcagccaagtaaagaacagattggcaaacgccaccacaaacaatgatacgcctccataggtcaataaagcgcatacaagaataatcatcggcatggctttgttctggcccaccatacaggtcacagcactgacaattgagtagtaaaaaccagcaagttcaatcagcttgccaaatactgcacccagcagaaagacaggaaaataaagttttacaaaaccgatcaacttatccataaatatatcactgaaaaccggggcgaccgtcactggacgggtgaacagaactgcgccaagtgctaccagcggagcaaaaaggatcacactgtaaccacgataagcgaccagcatcagtaatgaatacattcattgtcttatctcgctagcatgactacccattttatccatgttatgcaacagcttgtgtcatatttttctgatctccattttagatcagacaggctattactcagggattccggcgcgaagaatggaacatactctaaaaagtactcggcggattcaagtcggtatcactccgttaataatctttattctcgacccgctgcatgttgattttacggttaaacgccgttctcttattcatcgcaggagtaaaccatcatgacacgcagtgaaatccccagaaaacgatcatgtattcaatcgttgattatcgtttcgaataccgacttttatcgcaggatttatgatggctaaagtcgatgtgaaatgcccgttttgcgcgcaaacggcatccgttaaaaagtatggtccggggagtgcagggcaccagcattaccgctgtcaggtatgttgccgcagctttcaggtcgactatgaataccgcgcctgtcagcccggcatgaaagagcaggttgttgatcttgccatgtacactgccggtattcgtaatccgcaggggctggccatcaatccctggagcggcgcgctatggctgcatgaacacggtccgcgcggcggcgatgaaattaacatcccggaaaaaggcaaaaattatggctggccgctggccacatggggcgtcaactatagtggtctgaaagtgccggaagccaaaggtgaaattgtcgagggaacggcgcaaccggtttactactggaaggattctccagcgatcagcgggatggctttttatgccagcgacgtttttgcgccgtggcggcacaaactgtttatcggcgcgctaaaagataaagaggtcattgtgatgcgcgtcgatggcaatacggtgacggaagaaggccgtattctgggtgacagaaagcaacgtatctacgatgtgcgtgtcggacctgacggctacttatatgtgttaaccgatgagtccgacgggcagttactcaaggtaagtcctgcagccacgcgttaggtcaccgggatcatcaccactttgcgaaaagcagggcgctcggtaagctgctgataccagcgttccagattcgggcgcggcgtccatttcagacccacgttcagcaggttatagacgaaaggcgcaatagcgatatcaccggtgccaaagttatcccctgagaaccacggctggtgggccagcgcatcatcaagaagcgcaaacaggctatcacacttttcgataccggcttcaattgccgcctggtcgcgtttttccggcggggttctgaccagtcccatcaggatcacgcggtgcgccgggcttaacgtttgattcgcccagtccatccatttttcgccctccgcacgccgcgccggattatcaacccatagccggttctggccgtattgcgccgccagatagcggacaatggcattggattcccacaataacaggtcggtttcatcatctttaagcagcggcaccagcccattaggattcatcgccagatagtcggcatcctggttaacgccgaattttccgcctgccagaatttgatcgtatggcagttccagctcttcaagcgtccacaacacttttttaacattagtcgagttgttccggccccacagcgtaatcatattaaccccttccgttttatcaggatgatgacagtaatcggcctaccgtgagataaacctaacatttacacaatggtctgtaaaaaaatcgttatgaaggaagcgtaacgggatgttattgcataaactttaaaaactttaccaagttacggtttctttaacgtcgtgagtgcgttattactcaccgcacttattacacggtggtgtgacgtgtgtttttggaatggatactcgggtggtactatgacgcaatacgcttcttcccttcgtagcctcgcggcaggttcggttctcttattccttttcgcttcgcctgtaaaggcagaggaacaaacgatcgcgccgccgggcgttgatgcgcgagcctggatcttaatggattacgccagcggtaaagtactggcggaaggcaacgccgatgagaaactcgaccctgccagtttgacaaaaattatgaccagctacgtggtgggccaggcgctgaaggcagggaaaatcaagctgaccgatatggtgacggtgggcaaagatgcctgggcgacggggaacccggcgctacgtgggtcgtcggtgatgtttctgaagccaggcgatcaggtgtcggttgcggatcttaataaaggcatcatcattcagtcaggtaacgatgcctgtatcgcgcttgccgactacgtcgccggaagccaggagtcctttatcggcctgatgaacgcctatgcgaaacgactggggttaaccaatacaaccttccagacggtacacggtcttgatgcgccagggcagttcagtaccgctcgcgatatggcgttgctcggcaaggccttgattcacgatgtgcctgacgaatacgccattcataaagaaaaagaatttacttttaataatattcgtcagccaaaccgcaaccgcctgttgtggagcaccaatctgcatgtcgacggcatgaaaacggggacaacggctggcgctgggtataaccttgtcgcctccgccacccagggcgatatgcgcctgatctctgtcgtgctgggggcgaaaacggaccgtattcgttttaatgagtcagaaaaactgctgacctggggtttccgcttctttgaaacggtcacgccgattaaacctgacgcgacattcgtgacgcagcgggtctggtttggcgataagcatgaggtcaatttgggggcgggcgatgcggggtctgtgacgattccgcgtgggcagcttaaaaacctgaaggccagctttacgttgaacgaaccacagctcacggcgccgttgaagaaagggcaggttgtcggcaccatcgatttccagcttaacggaaaatccattgagcaacgcccgttaatggtgatggaaaacgtcgaggaggggggatttttcagccggatgtgggattttgtgctgatgaaactccatcagtggtttggcagttggttctcgtaaaataactccgtagccgggtgcgcgtcgcatccggctacgggcggttaatacatcagagtaatttgttgcgctttagcgtaggccacaaaggcctcatcgggacggcggtcgctgataatcgtatcaaagcgtgataattcccccatccgcgccggacgtaccttgccgaatttactgtgatccaccaccagtacatggcactgtgccattgtcattgcccaatgttttaccggcagctcttccagattaaagcaggtagcgcctttactggtatgaacgccagcggcggaataaaacgcgatatccggacaaatattgtttaacgtttcatggaaatcaagcggtttgaaaatggcgttgctggcgtgaaactccccgccgctgaggatggcgcggcaatggggtttgtcctgcagcgccaggaaggtattaagtgaatagcacaccgccgtaaagggaaggtcattatcaatggcttcaatgatccacggcgtggtggtgccgcagtcaataaataccgtctgatgcgcttgtaccaggcccgcagccagctgagcggctcggcgtttttcttccaccagacgagatttttgatcgcttaacagataatgactggcgctgcggggctccagtacgatatagccgcctagcaacacgacaggcgcgcttttatggttcaggtcgcgacgaatggtcatttcagagacgcccaacagggtcgcggcttctttaagatgaagtttatcgctgcgttttaaggcctgcagcaattgaccaatacgctcgtcgcgtcgcgtttccatagttcccctggagagttaaataagcgctccgcaccatacagagcgcttaatattactctttttttcgctatttagtcacgtacccagccttttcgaatgggcaatgcgaaacagaaacggtaacaacgttgcagcgcctggtagagcggcgcgccgtaccactgccagatcagctgtgcgctcaggcagccaagcatcgctaccagcagcgcgccaatcatatctaacggccagtgtacgccgagatagacgcgcgaccaggcgatggtaatggctatcgccatcatcacgatgcctgaccagaggcggtgccagaacaaaaacgccagcgcaaaggtaaaaatcaccgtaccgtgatcgctggggaacgagtcatcggcggcatgatgcaggaagttatagccgatatgatcgacaaacggacggtcgtgcgggaaaaggtgtcccattgtccaggagaccgccagactgataatcagcgcgatgccgattttaacgatcagctggcgctgggcgcagacccgatcgcggggcccccacagccagagtaccacggctaagagcgggacgatgttgatgacatctttggcgataaagatagcgagcgaaattatccactgcgcggaatcaggcgtggcgttaataaaataaaacagcgagttgttaaggttttccagcataacatccaggctcggagcaatgaaatcaaaagggatagccagctcatccccgtgcaaactgagcataaatgcagcgtaacagggaggaaaagcagtattgtcttatttggcggcaacatgaagagatttaagacaatggcataaaataacgttgatgataacggcgcaaacttaaattaaccttaaagtacgcaagcgctaagcggctttctgtaaaaatgtgcgctatttcccttgcagcctcataattcgctatctcagttccccgactttcattacactctgcgcggtttttattggcgaagagatggtatgcagaatcgtttacaatcaggcggcaggctgggacgtcaggcgctgctttttcctctctgtctggtgctgtacgagttttctacttatattggcaacgacatgatccagccgggtatgctggcggtggttgagcagtatcaggcgggcctggactgggttccgacgtccatgaccgcttatctggcgggcggtatgttcttacagtggctgcttggcccgttgtctgaccggattggccgtcgtcccgtgatgctggcgggcgtcgtgtggtttattgtcacctgcctggcgacgttactggcgaaaaacatcgaacaatttaccttcctgcgttttttgcaagggattagcctgtgttttatcggcgctgtagggtatgccgcgattcaggagtcctttgaggaggcggtgtgtataaaaattaccgcgctgatggcgaacgtggcgttaatcgcgccgctactgggaccactggttggggcggcatgggtgcatgttctgccgtgggaggggatgtttattttatttgccgcactggccgctatcgcctttttcgggctacagcgcgcaatgccggagaccgccacgcggcggggcgaaacgctgtcatttaaggcgctgggccgggattatcggttggtgataaaaaaccggcggttcgtcgcaggggcgttagcgctgggatttgtcagcctgccgttgttggcctggattgcgcagtcgccgattatcatcattagcggcgaacagctcagcagctatgaatatggtctgctgcaggtgcccgtttttggcgcgctcattgccggtaatctggtgttggcgcgtttaacctcccgacgtacggttcgctcgctgatcgtgatgggcggctggcctatcgtcgcggggctgatcatcgccgcggcggcgacggtggtttcatcccatgcttatttatggatgacggcgggattaagcgtatacgcttttggcattgggctggcgaatgccggactggtgcgtctgacgctcttttccagcgatatgagtaaaggaacggtctcggcggcgatgggaatgctacaaatgctgatttttaccgttggcattgaagtcagtaaacacgcctggttaagcggcggcaatgggctatttagcctgtttaatctggcaaacggtattctttggctactgctgatgctggtcttcttaaaagataagcggacggggaatttgcaaacagtctgagagagcggctacgcctgataagctttctgttatcaggcatagagaggcatccgctagacgttgaacggcggctcgttgtttaatacgctgtcgataatatccagcacgccttcctggttgttcgatccggcgcggtatttcgccgccgccgcgactgcttcgctggcgtgcgacatggcaaaactaaacccggcctgacgcagcatctcaatatcgttgccgccgtcgccgaataccaccacttcactatcatgaatgccccagcgctgctgtaacagacgcaggccgttggctttatgcacgccgggaataattaaatcaatactgccatagccggtatgaacgggaaccatgatatcgccaatggcgtcgtgcagcgccgcctgtacttccggtatccgttcatcggtaatattaaggccgaatttgaaaaagacatcgttgatattattaaaattatccacaaactccagacgatgataatacattgccgcaacggcttttaacgcatcgtcgtagcgtttcagcgtgtaggcgctgttttttccacaggcgatgatctccacatcggcgcgtgtgagcaggtgttcgacaaccgcctggaagtcggcttttgtcagctcgccgttaaaaatatcctcgccttcgctgaccacccagccgccgttttccgcgacaaaagcgatttcgtgcgcaatttccggaaagaacgagattaactggtaatactggttgccgctggccacgacaaagcgaatgccttgccgcttcatttgttggtactgcgccataaaccggtcacggttataggttttttgatcgctcagaaaagtgccgtccatgtcgacggcgattaatttgatactcatgcgttatgctccatcaccggttgcggagtcgatacaggtttggcgacggccttcgccaccagcgccgccagaataaccagcgccagcacaaccatcatggcgctgcgtaatccataatgctctcccagatagcccaacagcggcggcccgaccaaaaacgccagatagccggtcgtggcgacaacgctcacgcgcgtcggcgcgtcgggaccggtatcgctggcggcggaaatggtcagcgggaagccgagcgaagcgcctaagccccaaagaatgaccgagacgccggcgacccagtcgctatcgacaaaaataatcaggccaatgcccagcgctcccatcaacgcgctggcgcgaacaaccgtcacccggctatagcggtcaataaaccagccgccggtaaagcggccaacggtcataccaagcgtgaaaccggcgtagatcagagagccggaggttgggctaaaaccgtgtccgtctaccatcagtagcggtagccagtcattcgcagatccttcggcgaatgccattgccagcaccaccacgccaataagcaaaagctggatgtcccgataaaaaggtaatcctttttcctgaaggtgagaatcttccgatgcgtttttacccgtaccgtcagggatcgcccgaatggcgatgaaaatgggcgcgatcgccacggcagccgcgaggatgatatggatgttagccgggacgcttaatgcggttaacgccatgccgacaccagcgcccgccagcgtgccgaaactgtagaaaccatgcatcatcggcagaacggttttattcagctcgcgttcgaccgccgcgccttcgacattaatcgccacttcggcggcgccaaaactggcgccgaaaacggctaatccaagggcaaaaatcagcggcgaggcgcaccacagcgcgacgctaagaataaccatcccggttactgcacaggtcatcgtcgtgcgaataaccttccgggtgccaaatcgtttcaccagccaggcggaacaaagaataccgctcattgaaccgatagaaagcccgaataagaccgcccccatttccgcggtagagacggaaagaatatcccgaatagcaggcgttcgggttgcccaggaggccatcagcagtccgggtaaaaagaagaacataaacagcgcccaggtacggcgttttaaggcgttacgtgaggagaggacggtcatagcgtcaggccagaaaatagaagcgagaggtaaacattagcaagcttgtgtacatttgtacatatcatcgtcatacttcattgtgcagacagtttttactgtctgttttttcagcgtaagcggcaggctactatcgcctgcatcctgaatgagatgtggaactcatcatgaaagaaaatgccgtaagacgcgccaatgatcctaagcgacgggaaaaaataattcaggccacactggaagcggtaaagacctatggcgttcatgccgtgacgcaccggaaaatcgccgctatcgctcaggtgccgcttggctcgatgacctactattttgccggtatggatgcgttattgagtgaagcttttacacttttcaccgagaacatgtcgcgtcaataccaggacttttttgcgcaggtgacggatgcggagggggcgtgccaggcgataacggaaatgatttacggctcgcaggttacgacgccggataatatggcgttaatgtatcagttatatgcctatgccagcgataagccggcgttaaaaatagtcatgcaaaactggatgcagcgtagccagaatacgctggcgcagtggtttgacgcacagaccgcccgagcgctggatgcgtttatcgaggggatgacgctgcattttgtaacggatcgaacgccgctggcgcgtgaagcgattttacagatggtaaagcgaatcgccggagtgtcaatgtcgtgtcactctgcgttgggcaacaaaaaacccaccaaccttgaaccgaaatggcggggttgatgggctccacaaaatggggacatcaaagaaaagcagtggcaataggtatgactgatgctttaacgaaaagttcgacctattggcaaaattttttcacttaaaggcaaacttcagttttatcctaaccccggccagatgatgacaataagcgtccccgccagcgttagcagaacgttggcgatggcgtaagtccccgcataacccagcgctggaatattactgcgcgccgtatcgctaatgatttccatcgccggggcgcaggtacgcgcgcccatcatggcaccgaacagcagcgcccggttcatgcgcagcacataagcgccaaacaagaagcagatcaccaccggtaccaggctgacgacaagcccggcgatcagcatttgtccgccgaccgcgcccagaccgttgctgataccgctgccggcgcttaaaccaacgcctgccataaacaccatcaagccgaattctttcaccatattaagcgcgccctgcggaatataaccaaaggtaggatggttagcgcgcaggaaaccgagcatgatcccggcgaacagcaatccggccgcgttgccgataccgaaactaaaattgctgaactggaaggtaatcatcccgatcattaacccgatgataaaaaaagcgcagaaggcaagcaggtccgtcacctgactatgaatcgaaataaaaccaatgcgatcggcgatggtttttacgcgtctggcgtcgccgctcacctgtaacacgtcgcctttattcagcacgacgttatcgtcgataggcatttcgatctggctgcggatgacgcggttaaggaagcagccatgatcggtcagcttgagctgagcgaggcggcgaccgaccgcattgtggtttttcaccacaatttcttccgtcacgatgcgcatatcaagcagatcgcgatcaaatacttccttaccattacggaagctgggatcgagcctggcgtgcgcgtccggatagccgaccagcgcaatctcatcgcccatttgcagcaccgcatcgccatccgggttcgccagaataccgttacggcgaatacgttcgatatagcagcctgtctggcggtaaatacccagctcgcgcaggtttttaccgtcagtccaggccaccagttccgggccaacccgataggcgcggataaccggcaaataaaccttgcgattagcatcggtatccagaccgcgctcgcgagcaatttgctgggcgctggtttgcaaatcctgatgctgtagtttaggcaagtagcgcgcgcccacgatcagactgaccaacccaatcagataggtcagggcatagcccaggctcagattatcaagagcggaggagagttgggtgctggcgatgccggaatgtcgcagggtatcgcctgcgccaaccagcacgggcgtggaggtcattgagccggccagcataccggccgtcaggccgatatcccagccgaatagcttaccaaggcctaaggcgattagcagagcgctaccgaccatgaccagggcaagcatcagataatttttaccgtcgcgaaaaaaaatcgaaaaaaagttggggccagcctcgacgccgacacaaaaaataaacagcataaatcccagatttagcgcgtcggtgttaatactgaagtgttgctgccctaataatagagagaccactaaaacgccaatggaattaccaagttggactgaacccagacgtaacttgccaagacacaggccaagagccaggaccacaaataataacaggatgtaattcccatttaacaaatctgcgacgtttatattcacggagactaacttcttgtttacgagtaagctgttgaaagaaatggtaatttacgctactgtttttatcatgaattaagggtgcaatcgtattgcatacagcatccaaataaaaacaacacaacaatatatcctgctagtttaatcttattgcgtactaacggctataagaatcgtgcaggtgtgtttttggcatggaatgccacatgactttatctgactggatgcctcacggcggaaagcgtgttcgatagagagtgtcaggaggaacgattgaaacataaacacgggtgggcaagcgttgtctgctgctttgtactctttattgtggtgtgtctttcattaactatgcatgtacaaggcgcttttcgcgcggcagggcatcctgagattggactgttattttttacgttgcctggtgcggtggccagcttttgttctcaccggcgcgaggtgatccgaccgctgatcggggcgatgctggcggcgccgttttgcctggtgttaatgcgcgtggtatttatgcctacccgatcgttttggcaagaactcgcgtggttatttagcgccgtattctggtgtgcgttaggcgcgctctgttatttgtttattagcagcctgtttagccaccggcgaaaaaaacgccgatagcgccctccgtcagagggcgttgccagagcaatcaggcgaaaagattcagattttcttttgcccatgcttcaaaatccgtacagccgccgatatgtttttgatcgacaaaaatctgcggtacggtttctacaggtttacctacggttttttccaaatccgctttagtaatgccttcagcatggatatcaatatagcggtagttgaaatcgtcgcgttctttgctcagtttttccgccaactcttttgcacgcacgcaataagggcaccctggacggccaaaaataacagtaaacatatctctcctcgaacataaagccagacggcgaacaggtgttatcatgccgcgatttacggcagatgaaaagcaggttacgcctgttcctttgataacccagggctatatctgttaagcacgccggaccagaacgttctacactgtgcgtcagttaaccgggaggcttgatatgcgcacgattggcgtgttacccaaaagcgtactgatactggaatacctcggtatgattttgctggcgcttgctctgctatcgcttaatcattaccttacgctgcccgcgccgttcaatacgccgctggctggcgtattgatggttttcctcggcgtcgtgttgatcctccccgccgcggtggcgatgatgtggcgtattgcgcagttactggcgccgcagttgatgaaacgtccacccgacatttcttcccgttcagatagagaaaagcataatgagtccgaccattgaacttctttgtggccatcgttctattcgccatttcaccgatgaacccgtgactgacgcgcagcgagaggccattattgccgccgcgcgcagcacgtccagttccagttttttacagtgcagctctattatccgtattaccgatcgggcgctgcgtgaggcgttagtgcccctgacgggcgggcaaaagcatgtggcgcaggccgctgagttctgggtattttgcgccgattttaatcgtcatttgcagatctgtcctgacgcgcagctggggcttgccgaacaactgttgctcggtgtcgtcgatacggcgatgatggggcaaaacgcgctgacggcggcggaatcactggggttaggcggcgtgtatatcggcggcatccgtaacaatattgagtctgttaccgaactattaaaattgccgaagcatgtattgccgctctttggcctgtgtttgggatggcctgcggataatccggatctgaaaccgcgcctgcctgccgagcttgtggttcatgagaaccagtatcaaccgcttgatgaaaagctgctggcgcgctatgacgagcagttggctgagtattatctgacccgcggcagtaatacgcgacgcgatacctggagcgatcatatccgtcgcaccctgattaaagaaaatcgcccatttatccttgaatatttgcataaacagggctgggcgacgcgctaaaacctgcgggccagtgtatgatacgcgggcttttcagggttttcagcgaggtgcagggtgaaaattgccatattgtccagggatggaacgctctattcttgcaaacgtctgcgcgaagcggcgatgcggcgcggccatctggtcgagatactcgatcctctttcctgctatatgaatattaatccggcagcgtcgtcgatccattacaaggggcgtcgtctgccccattttgacgccgttattccccgtattggttcggccattaccttttatggtaccgctgcgctacgtcagtttgagctattgggtagctatccgctgaatgaatccgtcgccattacccgcgcgcgcgataagctgcgatcgctacaacttctggcgcgccaggggatcgatcttcccattaccgggatcgcccattcgccggatgataccagcgatcttattaagatggttggcggggcgccgctggtcgtgaagctggtagaaggcacgcaagggatcggcgtggtattggcggagacgcgtcaggctgctgaaagcgttattgatgcgtttcgggggctcaatgcccatatcctggttcaggaatacattgccgaagctaaaggatgcgatattcgttgtctggtcgtcggcaatgaggttgtggcggcgattgagcggtgcgcgaaagccggtgattttcgctccaatcttcatcgtggcggggtggccagcatcgcgacgatcacgccccgtgaacgggatatcgccatcaaagccgcacagacgctggggctggatgtggcgggtgtcgatattttacgcgccgcgcgcgggccgctggtgatggaggtgaatgcctcgccgggactggaaggtatcgaaaagactacgggcgtggatatcgcggggcgaatgattcagtggatagaacgtcacgctacgcctgaattttgccttaaaatcggcggctaatcgcaatcgtggattccgccgtagtacgaagcacgctttttgcgtaagctgtgccggtaattttttcatcgtcatcgtaagaggtagcactttattatgatatcactggtcgttcccactctggatacgttgcgtcaatggctcgacgacctgggcatgaatttcttcgaatgtgatacctgccaggcgctgcatttgccgcatatgcagaattttgacggcgtctacgatgctaaaatcgatttggtggacaacaccgttcttttttccgcgatggcggaggtcaggccttccgcgttgctgccgctggcggccgatctctctgctattaacgccagttcgttgacggtaaaagcctttctcgatatgcaggatgataatctgccaaaactggttgtgtgccagtctttatccgttatgcaaggcgtcacctacgaacagttcgaatggtttgttcgccaaagtgaagagcagatttctatggtgatccttgaggccggggcgcatcagcttctgtttaacgcggaagaagacgcgcaaaaaaccagcgcagttgaccattttcttcactaatcccttccgataatcaggcagtcgctgccagcgcggctgctgtttacacttttttatgctgctattaacctttatttaaagaattattcacctcctttctgaccatttcgctttatcacatagacaaaacctgcataaaaaattgataaaaggcgttttttaatctgggctatagcctcaaaccttagctaaagttattcttgcgaagcttctatagcgagcttgatggcagggagggcgacctctcttcttcatttgtatcaaatgaaaaggtatgcacatttcaggcatgttttaaaccacgcctaatgggttcatttgttaacggatttcagaaggaaagcgatgatgaccgccttaaagaaaaaatggctatcgggtctggttgcgggtgctctgatggtcgtctctgtcggcacgctcgctgccgaacaaaaaacgctgcacatttataactggtcagattatatcgcgccggacacggtggcgaactttgaaaaagagaccgggattaacgttatctatgatgtctttgactctaacgaagtgctggaaggcaagttaatggcaggcagcaccgggttcgatctggtggtgccatcggccagttttcttgagcgccagctcaccgcgggcgtttttcagccgctggataaaagcaaacttcccggctggaaaaacctcgatcctgaactgctgaaactggtagcgaagcacgatcctgacaacaaatacgccatgccctatatgtgggccacgacgggcattggctataacgttgataaagtgaaagcggtgctgggggatgatgcgccagtgaatagctgggatttagtcctcaagccggaaaatctggagaagctaaaaagctgcggcgtctctttccttgatgcgcctgaagaaatttttgccactgtgctgaactatctgggtaaagatccgaatagcagcaaagcggatgactacaccggcccggcaaccgatctgttgttgaagctacggccaaacattcgctatttccactcctcgcaatacattaacgatctggctaatggcgatacctgtgtggccatcggctgggcgggcgatgtctggcaggccgctaaccgagcgaaagaggcgaaaaatggcgtcaatatctctttctcgatccccaaagagggggcaatggcgttttttgatgtgtttgccatgccggctgacgccaaaaataaagacgaggcctaccagttccttaattatctgctgcgccctgatgtgattgcccatatttccgatcacgttttctacgccaatgcgaataaagaggcgacggcgctggtcagccagcaggtgcgcgataacccgggaatttatccgccggcggatgtgcgggccaagttgtttaccctgaaagtgcaggagccgaagattgatcgcgtccgcacccgcgcatggacgaaggtgaaaagcggtaagtaatttattaacggtatggcctgataagcgtgcgctatcgggcattccaccgtttgtatcgtttgattgtgttatgccggagagcgccttgtgaatgatgtcccccaccgcccgcaggtgaaaacccgtaaagcgctgacgccgcttctggaaattcgcaacctgacgaagtcattcgacgggcaacatgctgtcgatgatgtcagtctgactatctataaaggcgagatttttgccctgctgggcgcgtcaggttgtggaaaatcgactctgctacggatgctggcaggttttgaaccgccgagcagcgggcaaattatgctcgacggcgtcgatctggcgcatgttccgccgtatcagcgtccgattaatatgatgtttcagtcctatgcgttgtttccgcatatgacggtagagcagaacatcgcttttggtctgaagcaggacaaactgccgaaggcggagattaccagccgcgtcaatgagatgctgggtctggtgcacatgcaggagtttgcgaaacgtaagccgcatcagctttccggcggtcagcgtcagcgcgtggccctggcgcgcagcctggcgaaacgtcctaagctgctcttgttggatgaaccgatgggcgcgctggataaaaaattacgcgaccggatgcagctggaagtggtggatatccttgagcgcgtcggcgtgacctgcgtcatggtgacgcacgatcaggaagaagccatgacgatggcggggcgcattgccatcatgaaccgtggaaaatttgtgcaaattggcgaaccggaggagatttacgagcatccgacgacccgctacagcgccgaatttatcggatcggtaaatgtttttgagggcttactgaaagcgcgtgaggaggacggtctggtcattgacgcgcccggtttggttcatccgttaaaagtcgatgcagatgcctctgtcgttgataatgtgccggtatatgtggcgctacgtccggaaaaaatcatgctgtgtgagtcgccgcctgccgatggctataatttcgccgtcggcgaagtggcgcatattgcgtatctcggcgatctgtctatttatcatgtgcggctaaaaagcgggcagatgatcagcgctcaactgcagaatgcgcaccgttaccggaaagggttaccgacctggggcgatgaagtgcgtttgtgctgggaagcggatagctgcgtggtcctgacggtataagggggaaacatgagcacacttgaacctccggcacgcatcagtaaacctggcggcgcggcgctatggttggcgcgaatgcaaatgaaacatgggcgtaagctggttattgctttgccttatatctggctcattctgctgtttttattgccgtttcttatcgtctttaagataagcctggcggaaatggcgcgggcgatcccgccgtataccgatctgctggaatgggctgacggtcagttgtcgattacgctcaatctcggtaattttttgcaactgaccgacgatccgctttatttcgaagcctatctgcaatcgttacaaattgccggtatttccacaatctgctgcctgctgctgggctacccgctggcgtgggcggtggcgcacagcaagccctccacgcgcaatatcctgctgctgttggtgattctgccctcgtggacgtcttttttaatacgcgtctatgcctggatgggcattttgaaaaacaacggtgcgctgaacaatgtgttgctgtggctaggggttatcgatcagccgctgacgatcctgcacactaacctggccgtctatatcggcattgtttatgcttatctgccgtttatggtactgcccatttataccgcattgacgcgcattgattattcgctggtggaagcgtcgctggatctcggcgcccgaccgctgaaaacattttttagcatcattgtcccgctcaccaaaggcggaatcatcgccggctcgatgctggtttttatcccggcggtgggtgagttcgtgatcccggaactgcttggcgggccggacagtatcatgattggtcgcgtcctgtggcaggagtttttcaataaccgcgactggccggttgcttctgcggtcgccattattatgttgctgctgctgatagtaccgatcatgtggttccataaacatcagcaaaaaagtgtgggggagcacggatgaataacttaccggtcgttcgctcgccctggcgcattctgattctggtgctggggtttacttttctctatgcgccgatgttaatgttggtgatttactcgtttaacagttcgaagctggtgacggtgtgggcgggatggtcgacgcgctggtatggcgagctctttcgggataccgccatgatgagcgcagtgggactaagcctgacaattgccgcctgtgcggcgacgatggcggtggtgctcggtaccattgctgcggtggtgatggtgcgatttggacggtttcgcggcgcaaacggctttgcgtttatgatcaccgcgccgctggtgatgccggatgtgattaccgggctgtcgctgctgctgctgtttgtcgcgctcggtcatgctatcggctggccctccgatcgcgggatgctgaccatctggttggcgcacgtcactttctgtactgcctacgtggcagtggtgatcgcttcgcgattacgcgaactggatcgttcgattgaagaggcggcgatggatcttggcgcggcgccgttaaaggtcttttttgtcattacgttaccgatgatcatgccagcggtgatctcgggctggctgttggcctttacgctttcccttgacgatctggtgattgccagcttcgtttccggtcccggcgccaccacgctaccgatgctggttttctccagcgtgcgcatgggcgtgaacccggaaatcaacgcgctggcgacgttaatcctcggcgtggtaggaatcgtcggatttattgcctggtacctgatggcgcgagcggaaaaacagcggattcgcgatatccagcgtgcaagacgcggctgaagccactaaaatcttccactatggcaatgcgttgccgcgcgggtcgcggcatcattttcagggaagacattcattgggatttataaagcaatcaacctcatcacatgcccgtttaaatgtgcctacgctggtgcaggttgcggctatggcgattattttgattcgcggtctcgatgtgctgatgattatgaataccctcggcatacgcgggatgggcgagtttattcatcgcagcgtgcagacgtggagcttaaccctggtctttctggccagcttagtgctggtctttgttgaaatttattgtgcgttttcgctggtgaaaggccgtagctgggcgcgctgggtgtacctggcgacacaaattattgtgagcggatatctgtgggcggcgtcgttaggctacgggtatcctgagttgtttagcatcgcgggagaatcgaagcgtgatatcctgcattccctggtcatgcaaaaactccccgatcttttaattctgtttctgctgtttattcccgctcccagccgtcggttcttccggctgcaataatgtgtataatcgtcgccccggataatatgaaggttttttggtatgcagtgcgcactctatgacgcgggtcgctgccgttcctgtcaatggattacgcagtcggttaacgaacaactttccgcaaaaacagccgatttacatcgtttgctcgccgggctgcctgttgaacagtggtgcgcgccgattggcggcccggaacagcatttccgcaacaaagcgaaaatggtcgtgagcggtagtgtagaaaaaccgctcttcgggatgctgtatcgcgacggtacgccggtcgatctttgcggctgcccgctgtatcccgcctcctttgaccccgtattcagcgcgctaaaaccttttattgcccgggccggactcacgccttataacgtggcgcgaaaacgtggcgaactgaaatacctgttgctgacggaaagtcagttcgatggcggcatgatgctacgcttcgtgttgcgttcagaaaccaaacttacgcaactgcgcgcggcgttaccgtggctgcgtgcgcaactgccgcagctcagagtgatcaccgcaaatatccagccggtacatatggcgattatggaaggggagacggaaatctacctgacggatcagcaggcgctggcggaacgttttaacgatgtgccgctgtggattcgtccgcaaagtttctttcagaccaaccctacggtcgccagccgattatatgcaacggcgcgcgattgggtagggcaactgccggtacgccatatgtgggatcttttttgcggagtgggcggattcggcctgcactgcgcgacgccgcagatgcaattaaccggtattgagatcgcgccggaggcgattgcctgcgcgaagcaatccgctgccgagctgggattgacccgccttcatttccaggcgttggattccacccaattcgccaccgcacaaggcgaaacgcccgatctggtgttggtaaatcctccccgccgcggcattggcaagccgttgtgcgattaccttgcacaaatggcgccgcgttttatcatttattcgagctgtaacgcgcagacgatggcgcaggatattcgtcatctgccgaactaccgtattcaacgtgttcagcttttcgatatgttcccgcataccgcgcattatgaggttttagcgttactgcgcaggtcaatataatctattcacaatatttatttttatcccttaactatttcataaaaataataaatacaatcaattgattatttaattcaattggttgtatttatatattaccctatttttgcaaatcaaatcacaaataatcactttaaatcttttaatgactacttttgattattacagtgcgtgtaaggcaaaattagacaaggtggtttatcgggtaactttcaatagcatcagcgaagcaatacgtaacgtcagtaaaggggtcaatcatgacaacgaataggcacgcttatggagggcgttcagacgatgtttgccaaatttatagatgttattcaaacgtttttaactgaaccggcaatattaattgggatattagtcggtgttggctatgcgctggataaaaagacgcctataaaaattatcaccggtatgatcagcgcgatggtcggtttgatgatggtgttatttggcggctttcaattttcagccacttttaaaccggttgcagaggcagtcagcaaagcttatggcgtgcatggatacttaatggattcatacgccatgaaagccgcgacgcaaatagcgctgggcgataatttcggctatgtaggatacgtttttgtactggcgttttttactaacctgttattagttttatttggccgttataccggcgcaaaaggtatatttcttaccggtaataccggggtctctcattcacaggcagtactgtggttaatcgtcttctggctggggttcggttgggtacaatccattgtaattgccggggtattgaccggggtcttttgggcgttttcaactacgcttattgttaaacccatcgccaaagtgaccaataacgccggttttaccattgcgcataaccagatgctgggactgtggtttttctcgaaattcgcgcataaattcggcgatccggaaaagcatgacgccgaaaacctgaaacttcccggttggttagccatttttaaccacaacgtgacggcaatcgccattgtgatgacactcttcgttggcggttttctattggcgacagggatcgataacgtacagttaatggcgaaaggcaaaccctggtatatctatatcatcaatctgggcctgcaattctctatgtatatggtcatcttgctgcagggcgtgcggatgatggttggtgaaattaacggttcgtttaaaggatggcaggatcgctttattcctaacgctataccggctgtggatgttgctgctttattacctttttcgcctaacgcggccacgctgggattcgtcttttgtactttcggcacgattttttccatgggcatcctgctgctcatccatagccctattatggtattgcctggttttgttccgctcttcttttccggcggtcccatcggcgtattagccaaccgaatggggggatatcgttccgttattatttgtactttcctgttagggattattcagactttcggtacggtatgggccattcctttaaccaggctggcaaaagaaggtgtgggctggacgggaatatttgactgggcgactctgtggcctgcaatttgtgaattactgaaatttattgcttcaacgttccatcttggtccttattccatttaattgattcggtttatataaaggattttattatgaaagattctgtaaatattttattcgtatgcggttatggtgtaggcagtagcgtaatgttacagactgttgttaaaaaagcgttagcaaaatatgacttctcttttgatatggagcatacggcagcgggagaggtcggtggatttaccgactgggcagatatttatgcgatttcgaaaaaattgcttgatgttgttagcctcgatcctaaacacggacaatatctcattcccattgaaaatatcatggatggcgaatcaataggtaaacagatttacgatgtggtagagaaaaattttccgcacctgctcaacaaatgagggtgagtcatgaaagcgattattctgctgtttgacagtctgaataaaaactatttgccgccctatggtgatttgctaacgaaagcgcctaactttcaacgcctggcggcacatgccgccacctttgacaatagttatgtcggcagtatgccctgtatgccagcccgtcgggaactgcacaccgggcgctataatttcctgcatcgtgagtggggcccgctggaaccctttgatgattccatgccggaattattgaaaaaagcggggatctacacccatcttatcagcgatcatctgcattactgggaagacggcggcggtaactaccataaccgctatagctcctgggacgtagtacgcggtcaggagggcgatcactggaaggcgagcgttggcgagccgcccattccggaagtactgcgcgttccacaaaaacaaaccggaggcggcgtttccgggctatggcgtcatgactgggcgaaccgcgaatacatccagcaggaagccgattttccccagacgaaagtttttgacgccgggtgcgattttatccataaaaatcatgccgaagataactggttattgcaggttgagacgttcgatccgcatgagccgttttataccaccgaggaatatttatcgctctatgacgatgagtggcaaggcccgcattatgactggccgcgcggcaaagtcagtgaaagcgaggaggcgatagcgcatattcgctgtcgttatcgggccctggtttccatgtgcgaccgcaatctgggacgtatccttgatctgatggatgaacacgatctctggcgcgatacgatgctgattgtcggtaccgatcacggcttcttgctgggggagcacggttggtgggctaaaaatcaaatgccctattataacgaggtggcgaataacccgctgtttatctgggacccgcgcagcgcggtatgcggagcgcgacggcagtcgctggtgcagatgattgactgggcgccaacgctactggattattttcagcaacctattcccgcagatatgcagggccaaccgctggcgaaaatcattgccagtgatgaacccgtcagggaaggcgcgctgtttggcgtgtttagcggacatgttaatgttaccgacggacgctatgtttatatgcgggccgcgcagccggggcgtgagcatgacattgcgaactacacgttaatgccgatcaagatgaatgcgcgttatgacgtggatgaactgggaaaattatctctggcgcctccgtttaactttactaaagggcttcaggtattacgtattccggccagggaaaaatataaaggtgtgaatagctttggtcatctcttgtttgatctcagagacgatccgcagcagcaacatcctattcatgatgaggccatcgaagcaaggatgatcaacttacttatccgtttgatgaaagaaaatgatgctccggcggagcagtatcgccgtctgggtctggatgttgtctaaaaacgtaacaatgttgtaagccgggtgcgcgttagcgtcacccggcaagtattagtccgaatcgcctgttgatgcaggcgtttgagactgatgacaaactgtagaatgctcaatggcgctgcgcttatcaggccaggatagtttccgatggcggcccgtgggctgaataaggtatttatactgccatttcgcaacacggtgggctaatcacatacgtcttactgcgggaaccactgatcgctgattttctgataagtgccgtccgctttaatggcggccagcgcattattcagtttttccagcaacgccttattgtccgggcgcaccgcgatgccaagtccggtaccgaagtattgcggatcggtcactttctctgttgccggacccagttgcggattcgttttcagccactcattgaccactgcggtatcgccaaagacaccgtcaatacggccatttttcaggtcgataatcgcattctggtagctgtcgtaggccacggttttgacctccggatgtttatcctggagatatttttgatgcgtggtgccattttccataccgatacgcttaccttttagatcggtaaaggttttataggtgtcttttttggcaatcaccagcgcggagttcgcataatagggattgctaaaggcgacctgcttactgcgctccggggtaatgtccattccggaaatgacggcatcatattttctgaatttcagcgccgggataagactatcgaaagcatgattggtaaaagtacattctgcctgcatttgcttgcataatgcggttgccagatcgatatcgaagcccacaattttattactcgcatccagggattcaaacgggggataggtggcggaaaccccgaaattgattttttcagcggcgatgctgccagtggcgaaagaggcgagtaatgcagccagaactaactttttcatgatgtcactcccgtaatcttatgattatgcgccgtgtctgcggcatagatttacaatgccatcaattgaatttgtatgcaataaaaatgattaaatattttaaaatggataaaaaaagacggacaggttaaccacttgtccgtcggatttattcaatattatgcatcgtaggtttgataagcgcagcgccatctgaccattgtcgaacggcggcgagaatgccttatcctgcctggttaattgcgccgctcaaacgccagagctttacgctcaatcaaacgcatcatcagcgtcaatagaccgttgacgaccaggtaaattacgcctgccgcgccaaataccaccacatcgtaggtacgaccatagagcaactgactgtaccccatgacttccatcaaggtgatggtataggccagcgaggtacttttgaagaccagtaccacctcattagaataggaggagagggcgcgtttaaacgcatagggcaacaaaatcgccagcgtatctttcttactcatccccagcgcgctacaggactgccactgaccttccggaatcgcgcgaatcgcgccataaaatagctgcgtggtgtaagcggcgctgtttagcgacaacgcgatcagtgcgcacagccacggttcagacagtagatgccagagtagtggatactcttgcagcgtcgggaattgaccgggtccgtagtagatcaggaaaatttgcaccaacaacggcgtaccggtaaacagcgtgatatagccgcgcaccagccacaccacgaacggtgtttttagcgtcaggatgatggtaaaaactaacgccagcaccaaagcgacggcaatagaagccacggtcagcgtcaggctggtgtgtagcccttttagcagttcaggtaaatactcaagcattagtccggcctccgctcaaaacgtgtcgcgcgcaggtctatgcgtttgagaatgtactgactgatcagcgtaatgaccaggtaaatagccgccgcaataatgtaccagttaaacggttcctgggtgcgtgtggcaatacttttggtctgcaacatcagatcgttaacgctgataaggctgaccagagccgtatcttttagcaacaccagccactgattacccagccctggcagggcgtgacgccacatctgcggcatcaccagacggaaaaaaatcgccgtctttgataatcccagtgcctgacccgactcccactgaccagacggaacggctttcagcgcgccacgtagcgtctgcgacgcataggccgcatacagcagggacaacgcaatcacgccgcacaggaacggactgacgtcaaagttctcaatctccatttgcaccgggatctgcgtaaagccgagatggagggtaaacccgtcagacagcgtaagcaggagttgcgaggagccgaaatagataaacagcaccaccagaatttccggcaggccgcgcaaaatagtgaccagcgcggagcctatccaggcaatcgggcgccattttacggactcccagacggcaaagaacatggctaacgcgaggccaatgatcagcgcacagacggcaaggccgacggtcatcccggcggcgcttgctaaaggaaaaaattcgttcatcaaagattacttctggaaccatttgttatagatggtctcgtaagtcccatctttcttcactttttccagcgcagtattgaatttctgctgcagctcggtgttgccctggcgtaccgcgatacccaggccggtgccgaaataatctttatcggtgactttatcgccgaccggcgccagcttaggattggctttcagccattcggtcacgaccgccgtgtcgccgaaaacagcgtcgatacggccattttgtagatccagcttcgcgttctgatagctgtcatacggtacggtggtgatttccggatgcttatccatgatgaatttctggtgcgtcgtaccgttctgtacgccgactttcttgcctttcagttgatcaacgctggtgtatttgccctgctgacccacgaacagcgcggagttgtcgtaatatggcgtggtaaacagcacctgcttttcacgttccggcgtgatatccattcccgccattacagcgtcgaagcggcggaatttcaggctggggatcaggctgtcgaacgcctgattggtaaaggtacaggaggcgtcgatctctttacatagcgcgttggccaggtcgacgtcaaagccgacaatcttgttattagcatccatcgattcgaacggcggataggacgcttcggtcgcaaaacgaatggtctgggctgctgtagcggaaaggctaaagcctgcaattagcgcggcaatcagaacttttttcattgtcattgtcccgaatcttagtgagagagatagtttttgaacgcttcggtctgagggtgggcaaagcaacccgcatcaccgtgctcgacgatgtgaccattttccatataaatcacacgactggcggtcttacgcgccacttcgacttcatgcgtaacgatcacctgagtaatgttcgtttccgccagctcatgaataatgctgacgatttgagcggtaatttccgggtccagcgcggcggtcggttcatcaaacagcagcacctgcggctccatcatcagcgcgcgggcaatcgcgacgcgctgctgctgaccgccggaaagatgcaacggataacgatcgctatagggcttcagacgtaaacgctccagcagcttttctgcgcgcgccagcgcctgatcttttgtcagacccagtacgcggcagggcgcttcaatcagattctgcacaacggtgagatgcggccaaagattatattgctgaaagaccattccgacattttgacgtagctcacgaatcgccttatcggacggcgttttcgtaaagtcaaaatggttcccggcgatagtcagagtgccggagcgcggcatctcaagcagattgagtacacgcagcagcgaacttttacccgccccgcttgggccaagcaacaccagcgtttcgccttcggggcaatccagcgtgatatcgaacagcgcctgatgcgcgccgtaaaagcaattaatgccgtttaattgaatactcattgacactcgtatacaggcagtctgatagctattgaagccgcagatagtacctttcgcagaatagttatgcaatatttatgcgttaaaagttaaatatatcccacattcttccctaaacatagcacaaaatagcaggaggaatagtaggtaagaagaattgtcggcatcccgggcagaatgccagacaatttacggggttatgggtgcaaaagcgggggaatactgtctgttaacggttttctatcgactggcgcagcgtaccggcaggggcatggacatctccgcccagatagcgaacgtcgtcaatcacccagcatgagccttcgtgaatcataagcacttcatcctgccagctttgatcgccctgttttaacgctacccgcagaggaatgttgcgcgcatctcggttcggaatggttgatgcgctggcgacgttggcgctatccggcagcgtagcgcggctggagaacagatcgccgctcatcaactggcggtgctccgtatcgcggctggcgtcggttaacaatttcgccaggttatcactcaagtaggggcgaagcgcggcgatatcattgctgtggtgttgaatacggtagtcgtaaaattgttgagccacgctgtccgggccgccttccacacacgcgccgatacgcgggccattatctttgtaggcgggagtgacggtcgtacaggcgctaagcagaagcgcgcacgggatgagcaaagagagtttagaatagcgcatgatgatttccttataggcgatcgagcaaaaaccgatctacgataatcaattatatcctttcaatgatagcgtatcagcttgataatgcgtttgagatcgtgtgcttagctaacccgggagattcactatgcagttttcaacaaccccaacgctggaaggacaaagcatcgtggagtattgcggtgtggtaacgggcgaagccattttaggcgccaatattttccgcgattttttcgccggcattcgggatatcgtcggcggacgttccggcgcgtatgagaaagagctgcgtaaagcgcgtgaaatcgcttttcaggaacttggcgagcaggctaaagcgttgggtgccgatgcggtggtaggcatcgatattgattacgaaactgtcggcaaggatggcagtatgctaatggtcagcgtcagcggaacggcggtgaaaacgcgccgatgaaagcgctactgtggctggtgggtctcgcgttgctgttaacaggctgcgcgagcgaaaaaggaattatcgataaagagggatatcagcttgatacccgacatcgggcgcaggcggcctatccgcgcattaaagtcctggtgattcactatacggcggaaaactttgacgtttcgctggcgacgttaacgggtcgcaacgtcagttcgcattacctgattcccgcaaccccgccattatatggcggtaaaccgcgcatctggcaactggtgccggaacaggatcaggcctggcatgcgggcgtcagtttctggcgaggcgccacgcgtctcaatgatacgtctattggcattgagctggaaaatcgtggttggcgaatgtccggcggggtgaaatctttcgcgccgtttgaatccgcgcaaattcaggcattgattccgttagcgaaggatattatcgcgcgctataacatcaaaccgcagaatgtggtggcccatgcggatatcgcgccgcagcgtaaagacgatcccggcccgcgcttcccgtggcgcgagctggcggcgcaggggattggcgcctggcctgacgcccagcgtgtggcgttttatctggctggacgcgcgccgtatacgccagtcgataccgcaacggtgcttgcgttactctcgcgctatggctatgaagtcaaagccgatatgacggcacgcgagcagcagcgggtgattatggcgttccagatgcacttccgtccggcgcaatggaacggtatcgcagatgccgaaacgcaggcgattgccgaagcattactggagaagtacggccaggattaacgcggtaaatttccgtgatcgcgcagccaggcggcggtgcgctcaatgccttcgtccagcgtgacgatgggctggtagcccagctcgtcctgcgcgcgagtcgtatcgagcgtaaaatcaaaattcagttttgacacgccgtaatgcgttagcgggggctctttggcggattttttgccgaagcgctccatactgcgggcgatcatatccagcatcgggtaaggcacagagcgaatgcggcagtcgatagtcagttcatcaattaacttttgtacgatgctgcgtaaggtacggttttcgccgttagtgatgttataagcgcggccagaaggcagatgatcgcagcccggctggctggccagccacatggcgtggatcgcattttcatagtaggtcatatcgaccagcgcgctgcccccgtgcggtaataagacgctaccgtaatggtgcatcatatgcgccagacgtgggataaatactttatcgtgcgggccaaacaggctttgcggacgtaacaccgtaaaacgtgtttgcggattggcctgcgccaacagattaatcacctcttcgccggcggctttactgcgggcgaactcattggcaaaccgatgcgggcggaaatcttctttgatatcacggtgatggtggtaatcaaaatagagcgagggagaggagatatgaataaaattgcgcacgccccaggcgaccgcccattctcccagacggcgggtggcgcgaacattcgctagatcgaaagcctgttgggttccccagggcgaggtaaagctggagcagtgccacaacgtgtcgatcccggcaagcatcactttagcctgcgaggagaccagttcggttaaatccgcatggacgaattccgcgcccattttttcaagcagcttgcccatcgcttcattgcgacccgtcgctctgacgctgatgcctttattgcgcaaaaattcaaccgcgtttcgacctaagccgctggtggcgccggtaaccagtaccttcatatcaatccactgtgtttaataaaccgtcgtgcgcattcttccgtgaattacgtcggtatgcaatgggaaacacgaaagaatacagcaactttttctcatttttctgtgatttgttctgcaagtcgggcaatacgccttgccattccccggaaaataaacaggtgcgccgggatcatcagtagccagtaaatcaggcccggcattccgtgtggatgccaccaggcgcgcacgtcaatttcgcggtagcggcctttatcgtgcagcgtgaagctaagccgccccagacccggcgctttcatgccaaacaagagcgtgagctgtttttctggttcgacaatgatcactttccagctatctaccgtatcgccaggcttgagcaaggtatgcgacgggcggcctttcgccagtttatgccccaccagacggtccatcgcggcgcgcgtctgccacaaaatattgccgaaaaaatagccctctttgccacccagccgatttacgacctgccatagcgccgataggctggccggggtctgcgcggtaaagcccgcctgctttggaaaatagccgtattcgggacgccagcgggcgaaggccagcgcgtcgtagccccagtcgctggagttcaccagtttttcttcttctttcagcgtgcggcgaacggcgtcatcaaaggtgataagcgtttgggggatcaacttttttaacgcggcgtcatcggccagcaaatcgtgccttaatccctggattaacgcttttgcggtagttggcggcacggaggtaatgacgtttaaaaaccagaccgaaatccagcgggtcggaaaaggcaccgggatcagcggacgccgtttaccgctgacggccataaaacgttcaaactgctgctgataacttaatacctgcggcccggcggcttccagaatacgatgctcgcgagcagggtggtccagtaagccgaccaggtagtagagtaaattttccagagcgatgggcgtggtgcgcgaacgcacccagcgcggcggcgtgagtattggcaggttgtaaaccatgtcgcgcatgacttcgaaggcggcggagcctgcgccgacgatgatcccggcgcgtaattccgtcaccggtacgcctgcgtcgcgcagcgtgtcagccgtaagctggcgggcgcgcaggtgatcggattgctcatgcgccggtgcctgcagtgaactgaggaaaataagttgtttaaccggcgtctggcgcagcgcgtcgcgcacgttgagcgccgcctgacgctcatgggcgataaaatcgccgccttcgcccatgccgtgtaccagatagtaaacggtatcaatgtcgcgaagcagcgcgggtaaattttccggccagtgcagatcgaccttatgacaactgacgttggcgaggcgctgtttttccagacgttcgatgcgtcgcgccgccgctcgcacctgatgcccttgctgacttagcgcaaagaccaggtgctggccgatatagccgctggcgccgagaaccagaatgcgttgcgccacgttgctctccttagcgggctaaaaaggcgcgccagtgggcgacgacgtcggtaagctgttcgcgagagacatccagatgcgtcaccagacgcacaatcggcgcggcgttaatcaggatattccgttcccgcaaatagtcgccaagcgcggcggcctgtgcttcgccaacgcgaacaaacagcatattcgtttcgtggcgtatgacctccgcgcccgcttcccgaagctgctgcgccagccaggcggcgttatcatgatcctcttgcagacgcgccacgttatgcttcagcgcatacagtccggccgctgccagaatcccggcctgacgcattccgccgccgaccattttacgccagcgcgtcgcgcgtttaatgtaatcgcggttgccgaccagcagtgaaccgaccggcgttccgagaccttttgacaggcagatggtaaaagagtcgcaatactgcgtaatctcttttaactcacagccgtaggcaaccaccgcgttaaaaattcgggcgccgtcaacgtgcagcgccagtccacgttcgcgggtaaatgtccaggcgtctttcagatacgcgcgcggcagcactttcccgttatgcgtattttccagactgagcaagcgcgtgcgcgcgaagtggatgtcatccgctttaatcttcgccgccacgttctccagcggcagcgtaccgtccgcggcggcgtcgatgggctgcggctgaatgctgccgagcaccgccgcgccgccagcttcatagagataattatgcgcgccctgaccgacgatatactcttcgccgcgttcacaatggctaagcagcgcgaccagattggcctgggtgccggtgggtaaaaaaagcgccgcttctttaccggaaaggtcggcggcgtagcgctgaagggcgttaacagtagggtcatcgccgtatacgtcgtccccgaccggggcggtcatcatcgcctcgagcatggcgcggcccggtcgggtaacggtatcactgcgtaaatcaatcatggcacatccctggattttaaaaggtgatgtgcactgttttaccttagccagttcgttttcgccagttcgatcacttcatcgccgcggccgctaataatggcgcgtagcatgtacaggctaaagcctttcgcttgttccagtttgatctgcggcgggatcgccagctcttcttttgccacgaccacgtcaaccagtaccgggccgtcaatggaaaacgcgcgctgtagcgcaccgtccacgtctgcggctttttccacgcgaataccggtaatgccgcaggcttcggcgatacgcgcgaaattggtgtcgtgcagttcggtaccgtcggtaaggtagccgccggctttcatttccatcgccacaaagcccagcacgctgttattaaagacgacgatttttatcggcagcttcatctgtaccaccgagagaaaatcgcccatcagcatactgaagccgccatcaccgcacatcgcgataacctgacgacccggcgcggtagcctgagcgccgagcgcctgcggcatagcgttggccattgacccgtggttaaacgagcctagcaggcggcgcttgccgttcatttttagatagcgggccgcccagacggtcggcgtgccgacatcgcaggtaaaaatagcgtcgtcagcggcgaaatgactaatttgttgcgccagatattgtgggtggatggctttatcgctgagtttggctaagtcatcaagtcccttacgggcgtcccgatagtgctccagagctttatcgaggaatttacgattgcttttttcttccaccagcggcagcagggcgcgaagcgtggctttaatatcgcccactagcgccatgtcgactttgctgtgcgcgccaatactgcccgggttgatgtcaatctgaatgattttggcatcgctcggataaaaggcgcgataggggaactgggtgccgagcaggatcagcgtatcggcgttcatcatggtgtggaagccagaagagaagccaatcaggccggtcattcccacatcataagggttatcgtactcaacgtgctctttgccgcgcagggcatgaacgattggcgcttttagttttgccgccaacgcgaccaactcctcatgcgcgcccgcgcagccgctaccgcacatcaatgcgatattgctggagtagcgcagcagttgcgccagttttttcagctcttcctccgccggcgtgacgacggggagcggggcatggtaccaatgggtgacggcgttttcaggcgcgggtttcagcgccacgtcacccggcagtacgaccacggagacgccgcgatttaacaccgctttgcgcatagcgatggcgagtacctgcgggatctgctccgggctggaaaccaactcgcaatagtggctgcattcacggaacaactcctgcgggtgggtctcctggaaataaccgctgccgatttcactggacggaatatgggcggcgatcgccagaacagggacgtggttacggtggcaatcaaacaggccattgatcaggtgcaggttgcccggtccacatgaaccggcgcacactgccagctcgccggtaagctgcgcttgtgcgccggcggcgaaagcggcgacctcttcgtggcgggttggcatccattcaatggttcccatacgattaagactatcgctcaggccgttcagggagtcgccagtgacgccccagatttgttttacgccagcctgttccagcgttttggcgataaaagcagcaacggtttgtttcatggttctccatctccttaaatgtgataacggttacaagtttagttgaagatgacgatgacgtttttctttggcggagagaggggcgaaaggatgaagcgagtggtaaatcgcccggtggcgctgacgcttaccgggcctacgatggaacgtttaccgattatgcgagaacaagatcgccctgcggatggcaggagcaggccagtacgtaaccttcggcaatctccgcctcgctcagcgtcatggtgctactcaccgtatagtcgccggaaacgactttggttttacagcagccgcaaacacctgcccgacaggcagcggcaaccggtactttattactctccagcgcctccaacagcgtcgtaccgatcggggcataaaattcctgcgctggctgtagcttggtgaatttcaggccgctggttgccgtttccgccaccggcgtgaagaacttctctttaaagaagcgcgttacgccaagcgctttcactccctgttcgacgaaatccatatagggcgccgggccgcaggtcatcacggtgcgcgatgccaaatccggtacgctctgtaacaattccgtggtcagacggcccgcgataaaaccttccgtggcatgattttccgccactagcgtgaccggatactgtcgccactcgtcggcaaaaatcacatcatccggcgaacggacgttaaagatgacctgcacgtcggcctgcgggcggtatttcgccagccagcgacgcatcgacatgattggcgttacgccacaaccggcggcgagcagcagaaacttatcttctgttttatcgtcacaggtaaaatcgcccattgcatcagacagccagatgtaatcgccgcgcttgatgtcatgggtcaaccactgcgaacccgtgccatcgtcaatccgacgaacggtcagcgtaatatattcactgacgcccggcgtagacgaaagggtgtaggcgcgcagcgtttccgctgaattgcgcacgctcaccagcgcatactgcccggcgcggtaagggtagtagtcatggcataatagcgcaattgtccatacatccggcgtctcctgacggatgtgatgcacctgcattcgccagggacactgtgaggttggcatcgtcatcattgacctccttacgcgctcagcaattgcttcatgtcttcttcaacggtggtcacggaacgcagaccgaacttctcgttgaggatagccagcagatccggcgtgaagaagcccggcgcggtcggcccggtgacaatatttttcacgcctaatgacagcagcgtcagcagaatcacgatcgctttctgctcaaaccaggagagcaccagcgatagcggcagatcgttgacgccgcagcccagtttttccgccagcgtcaccgccaggataattgcggagtaagcatcgttacactgaccggcatcgaccagacgcggcagcccttcgatgtcgccgaactccagtttgttgaaacggtatttaccgcacgccagggtcaggatcaggcagtcatccggcacgctggtggcgaaatcggtaaagtagttacgctcgccgcgcgcgccgtcacagccgccgactaggaagatgtgacgcagtttttcacggctgaccagatcgatgagcgtatcggcagcgccgagcagggtctgacggccaaaaccgacggtgatgatatgcggaatttcgctatacgggaagcccgccatttgctgcgcctgggcaatgaccggcccgaagtcatcgccttcaagatggctaacgcccggccagccgacgatgctacgggtccagatacggtcgtcatagctgcccacggtcgggtcgataatgcagttagaagtcatcacgattgggccagggaagcgggcgaattcgacctgctgattctgccagccgctgccgtagttaccgaccagatgcttgaatttacgcagttccggatagccgtgtgcgggcagcatttcaccgtgagtgtagacgttaacgccggtgccttcggtctgctccagcaggttgtagagatctttcagatcgtgaccggagatcagaatgcacttgccttcagtcgctttgacgttgacctgagtcggcgtagggtgaccgtatttggtggtttcaccggcgtccagaatgctcatcactttgaagttcatctggccgatttccattgcgcactccagcagcgcgttcatgtcagcaggccaggtgcccagccaggccatgattttgtggtactgcgcgtaaatgtcgttgtcgtattgaccgagaacgtgcgcgtgctccatatacgccgccgcgcctttcagaccgtacaggcacagcagacgcaggccgaggatgttctcgccaatggcggctttgtctttattcggggtaaattccgccgcctgacgttgcaggtcgcccagatcgtcgctgaccagttgcagatcggccatcggattgtcgcaatgcgcattggcatccacgctcaggcactgcgctttcaacgcttcacgcaaggcaatcgcttcacgggcgtagccgacgatacgcggagagtcgaagttaacgttggtcagcgtggagaaaaacgcgcgcggcgcaaagttatcaacgtcgtgattaatgatgccatattcacgggccttcaccgcccaggcagacaaaccttgcaaagccgcaatcagcagatcctgcagatcggacgtttcagctgttttaccgcacattccctgcgcgtaggagcagccgtttccggctggtgtacggatggtttgttcacattgcacacaaaacatggtcacaccttttaaagttatatttaatatacatgtttaaggttatgcctgtgaacaaagggataaaagggatttctgccataatgtgcagggagattgatttagcgcaattttggcggcagatgcctaccgccaaagaggtatcaggccgagaagaacgccattaagagggggaccagcaggctgaggataaagccatgtacgatagccgccggaacaatctctacgccgccggagcgctgtaataccggcaacgtaaagtccattgaagtcgctccgcacaggcccaacgccgttgaacggctgcggcgaaccagaccgggaataagcataatggctaagagctcgcgggccagatcgttaaaaaatgccgcgctgccgataaccggtccaaacgactccgtcagcaaaataccggaaagagagtaccagccgaaacctgacgccatcgccagggcggtttttagcggtaagtccaggataaacgcattaatcacgccgcccagtaatgagcttgccacgacaacgaccgcgaccatcattccccggcggttaagcacaatttgctttaaggtcatgccgctatttcgtagctgaatccccaccaggaacaataaaaagatcagcgtatattcactggcttcggtggcgtgctgtaaaacagagagtccgctcaggccgatgacaaaccccaataccactacgccgcacagttgcagcgactccagcgccatggcaatacgtgaaggcagtttttcctgctgatgatggtgacgccacgggaggatacgttccagccacaataaggcggcgatattacacaataaaataatcgtaatactgacggcggaataatgaaaaatcgccaccagattactggcgaggttatccaaaaacgccaggcttattcccataaaaaagagaataaggtacacgatccagctcagtagccggttaataagttgtaatgcggctttatgtcgcagtggaatgagatagcccacaatcagtggaaccagaatgattaaaagtcctgaaaacatgaacagccgggcccttttttattgtttgaatagcgtacatgacactaccgaattccagactatcagtaaagcgacaccgtcagccgtacatttatcagacatttgccccaggcaaagggggggaatatcacgccaggcggacgcatttgccgttatactgcggtgaattttatggagtgatgacgtttttctggaggaagcatgattctcgaacgcgttgaaatagtaggatttcgcggtatcaaccgactgtcgttgatgctggagcaaaacaacgtgctgattggggaaaacgcctggggcaaatccagcctgctggatgcgctgactctgttattgtcgccagaactcgatctctaccattttgtccgtgaggatttctggtttccgcctggcgacataaaaggacgcgagcatcacctgcatattattctgacttttcgcgaaacgcagccagggcggcatcgggtacgtcgttatagagcgctggaagcatgctggtcgctttgcgaggatgattttcaccgtattttttatcggctagagggcgaatgcggcgccgatggcagcgtgatgacgctgcgcagttttctcaatagcgatgggcagccattactggtggaaaatattaacgatcaggtgcgccacctggttcgtctgatgccagtgctacgtttgcgcgatgcgcgctttatgcgacgtattcgcaacggtacggtgcccaatgtgccggatgttgaagtcacggcccgacagctggattttctggcgcgtgagctggcgacccggccgcaaaatttaaccgacgggcagattcgtcagggactgtccgcgatggtgcaactgcttgaacactatttctcagagcagggcgcaggacaggcgcgtcaccgactcatgcgccggcgttcgcaaaatgagcagcgtagctggcgctatctggatattattaatcggatgatcgacaaaccgggcagccggtcgcatcgggtgatcctgctggggcttttctccacgctgttacaggcgaaagggacgctgcggttacataaagacgcacgaccattactgctggtggaagatccggaaacccgtttacatcccattatgctttcagtcgcctggcaattgctcaatctgttaccgctacagcggatagcgacaaccaactcaggcgaactgctttcgctaacgccggtggaacatgtcgtacggctggtgcgcgaatcttcccgcgtcgccgcctggcgtctgggcccgggcgggttaagcgcggaagatggacggcgcatcgcctttcatatccgctttaatcgcgcgtcgtcgctgtttgcgcgttgctggctactggtggaaggcgagacggaaacctgggttattaatgagctggcgcgtcagtgtggacatcattttgatgcggagggcattaaagtcattgagtttgctcagtctggcctgaaaccgctggtgaagttcgcccgccgtatgggaatcgagtggcatgtcctggtggatggcgacgaagcggggaaaaaatatgccgcgacggtccgcagtctgcttaataacgatcgggaagaagaacgcgaacatctcacggcgttgcctgcgctggatatggaacattttatgtatcgtcagggctttgccgatgtttttcaccgggttgcgcaacttccgcctaatgtgccgatgaatacccggaaaattatcactaaagctatccaccgctcgtcaaagccggatttggcgattgaagtcgcgatggaagccgggcggcgcggaattgacgccgtgccgccgctgttcagaaagatgttctcgcgcgtggtttggctggcgcggggccgggcggattagcgtttgaatgtggccggaacctgttcgacgacgctatcgagtaatgcatagcggcggcgatactcggcccgttttttactggcgatctccgcttcgctttttcgggcgatcgccagcggcagcgtatagtaattccctttaattctttcaccgcctaacgattcccaaaacgcgtcatagtcggcatgcatttgcgtctttttatccatgtatcgccagctacgataaacgtgcgcatcgttactcacggctataatcttttctgcctgaaagacttgcgcaaactgacagagagcctccatcacgatgcgtttgggaaaaagaccatggcaggctttggtcgcctgctggataatttcgtgagggacgtcgtttgccgcgccctgtaatccgccgataaatagtgtgcgttgttggttaaagcgacacagggtaaatgtgatctctgccagaatacgtaactgtgcgtcgcgaacaacaatagtgctttcaccttctttatccagtgagaccagactgactaaatcaagttgaaacaactcgccggttttagtttcaaatttagcaagattcaggccatactgacttaaatagctaacttgttgttcccgcgataaaagttggcgcatctgttgataatgaaaacacagcgcatctaaggcgaaatcgcgtttaatatttacagccatataaggacgatgtagccgaataggcaaacgcggctgacgagcaagtaacgtatttaactccggccattgggtgagattggtcagtaattggctggtcgcacgcggcatgactaatgagcggattaaaaacttgcgacgaaagctggctttacgccagaattttcctggctgtaattgcccgcgcgtcagacgaataaataattgtaaaggagagatgtaatctgaagtgtaccaggtattatctgtaagctgtgtcatgatcgtaatccgcgacataagattgtcgagattgaaccacaggaaacattaaccaatcgtcaatacagccggcgctatctttattgcgtcaggtttgtttagatacggtttactttctggttaaaattttgccgtcagggtttctatgcgtgctaagggaaagaaatttaaaaagcgttatctggtcattattttaattcttttagtgggggggatggctggctggcgaatgataaatgccccgctgccaacttatcagacattaatcgtgcggccaggcgatcttgaacagagtgtactggcgactggaaaactggacgcgttgcgtaaagtggatgtcggcgcgcaggtgagcggccagttgaaaacgctgctggtctccattggcgataacgttaaaaaagatcagctactcggcgtgattgacccagatcaggcggagaaccagataaaagaggtcgaggccaccctgatggagctgaacgcggagcgtcagcaggcagccgctgagttaaagctggcgcgggttacgctggcgcgccagcagcagttagctaagactcaggcggtatcgcaacaggatctggataccgcggcgacggagatggcggttaaacaggcgcgtattggcaccatagatgcccagatcaaacgtaatcgggcctcgttggacaccgcgaaaaccaacctggaatatacccgtattgtcgcccccatggcgggggaagtgacgcaaatcactaccctgcaaggacaaacggtgattgcagctcagcaggcgcccaatattctgacgctggcggatatgagcaccatgctggtaaaagcgcaggtctcggaagcggacgtgatccatcttcgggcggggcagaaagcatggttcaccattgcaggcgatccgcaaacgcgctatgaaggcgttttaaaagatattctgccgacgccggaaaagatcaacgacgctattttttattacgcccggtttgaagtgccgaatcccaaaagaatcttgcgtcttgatatgaccgcacaggtttatattcaactcatggatgtcaaaaatgtgctgattattcctctcgccgcgcttggcgaaccggtgggcggcaatcgttataaagtggcgctgttgcgtaacggcgaaaaacgtgagcgcgaagtggtcattggcgagcgtaacgatacagacgtggaagtggttaaaggtctggaagcgggcgatgaggtgatcatcggcgaaagcaggccaggagcgacgccatgacggcattgcttgaactgtgcaatgtgagtcgtagctacccctccggagaagagcaggtggcggtgttgaaagatatctccctgcaaatccacgccggggagatggtggcgatcgtcggcgtttccggttctggaaaatcaacgctgatgaatatcctcgggtgcctggataaaccgaccagcggcacttatcgggtggcggggcgggacgtctcgacgctggacccggacgcgctggcgcagctgcggcgtgagcattttggctttatctttcagcgctaccatctgttgtcgcatttaacggcagcgcaaaatgttgaaatccccgccgtctacgccggcattgaacgcaaaaaacgccaggcgcgcgccagagagttgcttttgcggctgggattaagcgatcgcgtcgattacccgccttcacagctttctggcggacagcagcagcgtgtcagtattgcccgcgctctgatgaacggcggacaggtgattctggcagatgagccgaccggcgcgctggatagccattccggcgaagaggtgatggcgattttgcgccaactgcgcgatcgcggacatacggtgatcattgtgacgcacgatccgctgattgccgcccaggcggagcggattattgaaattcacgatggcaagattgtccataatccgcccgcgcaggaaaagaaacgcgaacagggcgttgacgctgccgtagttaatacggctcccggctggcggcaatttgccagcagctttcgcgaagcgctgtcaatggcgtggttagcgatggccgctaacaaaatgcgtactttactgaccatgctgggaattattatcggtattgcgtcggtggtgtcgattgtggtggtcggcgacgccgcaaaacagatggtactggcggatatccgcgctatgggcactaacacgattgatattcatccaggcaaagattttggcgacgacaacccgcagtatcgacaggcgctgaaatatgacgatctggtggctattcagaaacagccgtgggttaactctgcgacgcccagcgtttcaaagagcttacgtcttcgctatggcaatattgatattgccgtaaatgctaatggcgtcagtggcgattattttaacgtttacggcatgtcctttagggaggggaacaccttcaatgctgtacagcaacaggatcgcgcgcaggtggtggtgctggatgccaacacgcgacgccagctatttccaaataaagcgaatgtcgtaggggaagtggtgctggcgggtaatatgccggttattgttattggcgtggcggaagagaaaccgtccatgtacggcaatagcaatctgttgcaagtttggttgccctatagcacgatgtcagatcgcataatgggtcagtcatggcttaactcgatcaccgttcgtgtgaaagatggcgttgatagcgatcaggctgaacagcagcttactcgcctgctcaccttacgccacggtaaaaaagacttcttcacctggaatatggacagcgtcctgaaaacggctgaaaaaaccacctatactcttcagttatttctgacgctggtggctgtcatttcgctggttgtcggcggcatcggcgttatgaatattatgctggtttccgtcaccgagcgaacgcgtgaaatcggcatccgtatggcggtaggcgcgcgcgccagcgatgtgctacagcagtttcttattgaagcggtgctggtttgcctggttggtggagcgctggggattagcttgtcgatgttcatcgcatttatgctacagcttttcctgcccggctgggagatcggtttttcactgactgcgctggcgagcgcgtttttatgttcgacgtttaccgggatactgtttggctggctaccggcgagaaacgcggcgcgactggacccggtggatgcgctggcaagggagtaatcttgctgacgtcatttgtcggcctgataagatgcaacagtgtcgccaccaggcactggcgttaaataaaaatgccagccgatcgggctggcattttgcctcctggatgtacacaatgagacagaggagctatgcaacggcctctgcttcgatgggcacgatgacgctggcgtgattgccttttggcccctggtggacatcaaaccggacagactgtccggctttaagcgttctgtaaccatccatttgaatggtggaataatgggcgaaaatatcctcgccgccgccttcagggcagatgaaaccaaaccctttggcattgttgaaccactttacagtacccgtttccatgcttcgacatccttcgtaaatcttatataagtaagatggaatgaaccggtgacggagtgggggctgttcaaaacctcaccaactctcgacattacaatttagagaaatcaggcgaggcgtcaagcatcaggcaggggggatcgggtaaaaatgaatcaaaaatttgaagcagttaacgctattgccgggaatgtgacagatgtcgcggatggtactgatagatgttagttatctatcaattgaggtagattgattgtgtgcatagactctggtcagcggcagattttcctgccgacaactgtaaccgataatgacgactgacaatgggtaagacgaacgattggctggattttgaccagttggtggaagatagcgtgcgcgacgcgctaaaaccgccatctatgtataaagtgatattagtcaatgatgactacactccgatggagtttgttattgacgtgttacaaaaattcttttcttatgatgtagaacgtgcaacgcaattgatgcttgcagttcactatcaaggcaaagccatctgcggcgtgtttaccgccgaggtggcggaaaccaaagtggcgatggtgaacaagtatgcaagggagaacgagcatccgttgctgtgtacgctggaaaaagcctgaatgcaggtataaaaattgggggaggtgcctatgctcaatcaagaactggaactcagtttaaacatggctttcgccagagcgcgcgagcaccgtcatgagtttatgaccgtcgagcatctgttgctggcgctgctcagcaacccatcggctcgcgaagcgctggaagcatgctccgtggatctggtggcgctccgtcaggaactcgaagccttcattgaacaaaccacacccgtactgcctgccagtgaagaagagcgtgatacgcagccgacgttaagtttccagcgtgtcctgcaacgtgccgtcttccacgttcagtcttccgggcgtagtgaagtgactggcgcgaatgtgctggtggctatctttagcgaacaggaatcacaggcggcttatctgctgcgcaagcatgaagtgagccgtctggatatcgtgaactttatttctcacgggacgcgaaaagacgaaccgagccaatcttccgatctcggcaatcagccaactggcgacgaacaagctggcggggaggaacgtatggaaaacttcacgacgaatcttaaccaacttgctcgcgtgggcggcatcgatccgctgattggtcgtgaaaaagaactggaacgcgcgatccaggtcttgtgtcgtcgccgtaaaaataacccgttgctggtaggggaatccggcgtcggcaaaacggcgattgccgaagggctggcctggcgtatcgtgcagggcgatgtgccggaagtgatggccgattgcaccatttactcgctggatatcggttcgctgctggcgggcaccaaataccgcggcgattttgaaaaacggtttaaggcgttgctgaaacagcttgagcaggataccaacagcatcctgtttatcgatgaaatccataccattatcggcgctggcgcggcgtcgggcggacaggtggatgcggcaaatctgattaaaccgctgctttccagcggtaagatccgggtgatcggctcaacgacctatcaggaattcagcaatatttttgagaaagaccgggcattagcgcgccgtttccagaaaattgatattaccgagccttcggtggaagagacggtgcaaattatcaacggcttgaaacctaagtacgaagcgcaccacgacgtgcgttataccgcgaaagcggtgcgtgcggcggtcgagctggcggtaaaatatatcaatgaccgccatctgccggataaagccattgacgtgattgacgaagcgggcgctcgggcgcgtctgatgccggtgagcaaacgtaagaaaacggtcaacgtggcggatattgagtccgtagtggcgcgaattgcgcgaattcctgaaaagagcgtctcgcagagcgatcgcgatacgctgaagaacctgggcgatcgtctgaaaatgctggtcttcggccaggataacgcgattgaggcgctgaccgaagctattaagatgagtcgtgcgggtctgggccatgagcataaacctgtcggctcattcttgttcgccgggccaactggcgtagggaaaactgaagttacggtacagctttcaaaagcgctgggtattgagctgttgcgcttcgatatgtctgaatatatggagcgtcatacggtgagccgtttgatcggcgcacctccgggatacgtcggtttcgaccagggcgggctgctgacggatgcggtgattaagcatcctcatgcggtgctgttgctggatgagatcgaaaaagcgcacccggatgtctttaacctgctgctgcaggtgatggataacggtacgctgaccgataacaacggccgcaaggcggatttccgcaacgtggtgctggtgatgaccaccaacgctggcgtgcgagaaaccgaacgtaaatctattggtcttattcatcaggacaacagtaccgatgcgatgggcgagatcaagaaagtgtttacgccggagttccgtaaccgtctcgacaacattatttggttcgatcatctgtctggcgaggtgattcatcaggttgtcgataagtttatcgtcgagttgcaggctcagttggatcagaaaggcgtctctctggaagtcagtcaggaagcgcgcgactggctggcggaaaagggctatgaccgggcgatgggcgcacgaccaatggcgcgtgtgattcaggataacctgaaaaaaccgctggccaatgagttgttgtttggatcgctggttgacggcggacaggtcaccgtcgcgctggataaagagaaaaatgcgttgacgtatgacttccagagtgcgcaaaagcacaagccggaagccgcgcactaatcttcgtttcactgtcgtacaaaccgggccttagcgcccggtttttttgtctatggaaaacccccagctaggctgggggttccggaaagctttcagctttaagccagttattaaaaccccttttgatttgttaaaacatcttgcggtctggcaactgcaaaagttcaacaagaaatcaaaagggggtcccaatgggggacgaaaagagcttagcgcacacccgatggaactgtaaatatcacatagttttcgcgcccaaataccgaagacaagcgttctatggagagaagcgtagggcagtaggcagcatattaagaaaattgtgtgaatggaaaaacgtacgaattctggaagcagaatgttgtgcagatcatattcacatgcttctggagatcccgccgaagatgagtgtgtcgagtttcatgggatatctgaagggtaaaagtagtctgatgctttacgagcagtttggggatctaaaattcaaatacaggaacagggagttctggtgcagagggtactatgtcgatacggtgggtaagaacacggcgaagatacaggactacataaagcaccagcttgaagaggataaaatgggtgagcaattatcgatcccgtatccgggcagcccgtttacgggccgtaagtaacgaagtttgatgcaaatgtcagatcgtatgcgcctgttagggcgcggctggtaagagagccttataggcgcatctgaaaaacctccggctatgccggaggatatttatttacgccggataatagttagcctgatagcgttgtgctcgcggtaggcggataaggcgcttgtaaattgcgtcatcatccggtaatcgacgggtcaaatgcgaaaaaaagtccgtactttcgtacgaactctttcttgaatatggcggtgaggggggattgactcgctgcgctcgcccttcgggcagtctcctcgcaggctcgtcgtttgtccaactggctgcgccgctactcagcccatccctgggcctcgccccttcggggccagagcaagctctgttcaaaaacgctcccggcgtttttgtgtcgaaccccggtcgggtgttctcatcccccctgtagggtggctttattgactagtcctgatataggttgacagttttttgtctgtaaaacgcctgatgaacatcatcgggcgttttgtatttcagggccaggtgtggccgttcatggttataaattgccacggactcttttactatttcccgcgcttgctccaggtctgcaggacgcgagagtaaaaactcatttttcagtatcccgtttattctctcagccagcgcattctggtagcagtcgtaaccatcggtcattgaacaggttattccgtttcgctcatgaactgactgataaagtaccgaacagtattgcagtcctctgtcagagtgatgtaccagcggacctgtcgtttttctccgcctcagagcctgcctgaacgcctttaccacattttctgtctgcaggttttccccgacatggtaacccacgatttttctggagcaggcatcggtgaccagactcagacaggccgtgccgctgcgtagtggaaggtaagtaatatcggcgacccagacctgctctggctcaagggcggtaacctgttcagggccgggtttcagcagattaggatgccggtaaaagcgatgatggctgttggtggttttgtgatatgcccgtttcacgggtaccaggagccggtattcacccagcagattaaacagacggtcccgtccgatattcagcgttttatcggcctgcatgttcagcagatagtgcagtttacgcgtaccgattcgcggctggcggcaccgggtacgggcaacaaaatcaagaacctgagcatgatgctcctgccgtttattacatcttgtattgtactggtaccacgcctgtctgctgtgccccaggaactgacatgcacgcgtaactgttattttgggggcctgactttgcgtgaggacttgccgggccgcttttttacaacacttaccccgtaatcatttttcaggacgttgataacggactcaaaaaactcagctttctggtttgccagctcaagctgttcttcaagttccctgattctttgctcgggtgtcagcgggatagttgtctgagccacaggcagtttcctcttcaccaggtcaggaagtccgggtctccagtcaagccggccatatttacgcagccagacaagtacggtggagcgcccctgaatgccatatcgctgctgggcctgtttataggtcatctcgcctttttcgacctgctcaacgacggctattttaaaggatagaggataatcgcgttgggtgcgtttgaactcagtcatcatcacgttctccggatttaagtctggaacgtgtcaacgctattcaggacgggtcatatgtgaaaaaaaagcccgtactttcgtacgagctctttcttgaatatggcggtgagggggggattcgaacccccgatacgttgccgtatacacactttccaggcgtgctccttcagccactcggacacctcaccatattgtattgctgcctgaccacttggggggcaacggggcgctactatagggagttgcgctaaaacggtcaagcagaatttacatattcactgtcgtttgctcatgcaatagacataatccccgcccaaactggcgcggggaggcaaattaacgctgtgaatccaacatttcgttgtttttcaccacatcctgcgctttgctgtagctttctatcagcagttgataggccgggaatacctgagtataaacgtcggcccacgcggcggcgtcttcacggttccaggtgccttgcagctcagaggcgactgcggcagtatccatcggtacgacgccagcctgtacgatacgcgccagggtgatctcctgcgccatcttactgtaggtaccggatgcgtcgatcacggcaaataccttataaccttccgctaccgcgctaatggccgggaatgccatgcacacgctggtaatcgtcccggcaatgatcagcgtcttacgacccgtcgcttttaccgccttaacgaaatcttcgttatcccaggcgttaatttcacctttgcgcgcaatgtactgcgcatgtggcgcattagcgtggatctccgggatcagagggccgttcggaccttgcggtacggatgccgtggtaatgaccggcattttcgctaacgtcgccatcttcgccaacgccgcggcgcgagcgcgtaattccggcattggcatatcgcctacggtctggaaaagaccgctttgatgatcgattaaaagcatcacggaatcgttaacatcaattaccgggcgcaaaccattaaaattagcaggacttgacatcgtattctccttcatgttttcagatttggccaaaacggccggagttgaaatcgcgaactgcttctgcgatctcttgtttcgtgttcataacaaatgggccgtaacccacaatcggttcattcagtggctcgcctgataacagcaatacgctggcgtcgctgctggcctcaaggtgcagcgttttcccttgctggctcaacaccaccagttgcgcttcgttgaccggcgtcgtgccgttcaccgtgatattgcctttcagtaccaccagcgcggtgctccatccttccggctgtgccaatgtaagctggcgattgcgttgcaggcgcatatcccagacattgagcggcgagaaagtgtgcgccgggccttttgtctcttcataacgccctgcgatgacccgcacgactccggcgttatccggcaacgtaacggtcgggataacatcgtgggtaatgctttgataacccggggtggtcattttgtccttcatgggaaggttaacccacaactgcaccatttccagttcgccgccccgacgggtaaacgcgtcggaatggaactcttcatgcaaaatgcctgcgcctgcggtcatccactgaacgtcgcccgggccgataacgccgccgcgaccggtagagtcccgatgctcgacttcgccactataaacaatcgtcacggtctcgaaaccgcggtgtggatgctccccaacgccgcgtttttcattacccggcgtaaaggtgtgcggcccggcataatccagcagcaggaagggactcaactgctgcgcatgtgactgataagaaaagagtgaacgaaccggaaatccatcgccaacccagtgcgggcgaggtgcggtatagacgcctgtaatctgtttcatggtgttctcctcagtggcgttgtcttgatgtgaataagcttatattcatgacaaaaggttcggtagtggctaaaatggctcataccgttccattaataggacaatgtaatgataaaaacggatctcaatgattttgcgtggtttgtgcatgtggtcgaagagggtgggtttgccgcggcggggcgtgcgcttgatgaaccaaaatcaaaactgagccggcgtattgcgcaactggaggaacggctgggcgtgcgattgattcagcgaaccacccggcagtttaacgttaccgaagtggggcaaacattctatgagcactgtaaagcgatgctggtggaagctcaggcggcgcaggatgccattgccgcattgcaggtagagcctcgcggtatcgtgaagctgacctgcccggtgacgctgctgcatgtacacatcggcccaatgctggcgaaatttatggcgcgttatcctgatgtttcgctacagcttgaagcaaccaatcgtcgggtggacgtcgtaggggagggggtggatgtggcgattcgcgtcaggccgcgcccgtttgaggatagcgacctggtgatgcgcgtcctggctgacagagggcatcgcttgtttgccagcccggatcttatcgcacggatgggaatcccttccgcgccggcggagttgagccattggcctgggctaagtcttgcatccggcaagcatatccaccgctgggaactttacggcccgcagggcgcgcgtgcggaagtccattttaccccgcgtatgattaccaccgacatgttggcgctacgcgaggcggcgatggcgggcgtggggcttgtgcagctacctgtcttaatggtgaaagaacaactggccgccggtgaactggtcgcggtgctggaagagtgggagccccggcgggaggttattcatgctgtgttcccatcccggcgaggattattaccttccgtacgtgcgttggtcgattttttgacggaagagtatgcgcgaatggtggaagagtaacctgctcgtcattcatcaacttaatggacgcaaaaaaggccggttaaaccgaccttttatccagccgcccttcagggcgtgaggagacaattagcgactacggaagacaatgcggcctttgctcaggtcgtacggggtcagctcaacggtcactttgtcgcccgtcaggatgcggatgtagttcttacgcattttaccggagatgtgtgcagtaaccacgtgaccgttttctaactctacgcggaacatggtattaggtaacgtttcgagaacggtaccttgcatttcaatattgtcttctttggccatctaatcctctggggtatcactaccataatttgaaccggcaagataatgccgaacttcttttgataagtaaagatttgtgcgtttaaaacacagcaaaccaggtttagcacatgattccgcgacacacgacaacgccgcgttatacaccttttccctgatactaccgcctgatgtatcgacataagcgcaacatataagggaacggtgaaataaacgatgggcgttacctgacaacgggctgcgggataatgagctaaaccaattctgcggcagcaattataacaccccaataaaaaatgtgccgaaaacattcacttccggggcaaaaataatgtccgcggcacccaaaaacgggaggccagcggctgttggcgtaaggccgcgaggtgatcgaggtagtcacgacgtggaatttcaatggcgccgagcgaggcggtatgactattaagtacctgacaatcaataagtttaccgccgtgacgggtaaattcagcgcaaaaaaccagcagtgcggttttagaggcattctcctggcggctaaacatcgattcgccgcaaaacagcgccccctgcgagacgccatacatcccgccgaccagttcccgatcgcgccacacttcaatggagtgcgcgtggcccaattcatgtaatcggcgataggcttcctcaataccacgcgttatccaggtgccttcgtcacggtgattggcgcatccatcaatgacccgatcgaaagcgtaattgagcgtcacgcggtaaggggatgcgttgtgaaagcgcttcatactgcgactgaggtgaaacttttcaggccacagcacggcgcgaggatcgggcgaccaccacagaatcgggtcgcccggcgaaaaccacggaaaaatcccgtgctggtaggccattaacaaccgggcagggctgagatcgccgcccagcgccagtaaaccgttaggctcgcgtaaagcgccttccggcgaagggaaggcgatagaatgtcgggaaagctgaaccagacgcatgacggcgaaactccagtacgcaagtcggatcgttcaataatagcttacagacgttgtttaaactgataatagcgcccttgtccggctaacaattctgcatgagtgcctcgctcaatgatgtgcccgtcgtccattacgatgatttgatcaaaacgggccaggccgcgcaaacggtgagtcaccatcaggacggttttctcgcgcatcacatcggcaagtaattccagcatttcgctctcggtggtcgcatccagcccctcagtaggctcatccaacagcatcaacggggcatcgtgcaacagcgcgcgggcgatggccagacgacgaagttcgccgccggatagcagacgaccgccttcgccgagccagctattaagcccactatcttcgagcagattttcgaggccgacgcgacgcagcatgtcggaaagggcttcgtcgctggcattgggcgccgccagtaataaattatcacgcagcgtggcgctgaacaggtggacacgctgcggcaccacgctgatagtccggcgtaaggcggattcgctcagcgaggatagcggaagatcgttgagcagaatttcgccttgttgcgggtcccaggcgcgggtgagtagctgcaacagcgttgattttccgcagccggtacgccccagaatagcgacatgctcgccaggattagcctgtaatgagagggcattgagcgcattaatcggctggtcgggataacgaaacgaaacgtcccgcagggtgagtgtgaccttttccggcgcgggagtttctgcttgcggaaaggtcacctccggtttttgctccgttaattcagtgatacgaagcgcagaggcgataacctgccccagatgctggaatgcgccggtaacgggcgcaagcgcctcgaaagccgccagcgcgcagaagacaaacagcgcgatgagcgcgccgggctgcgtattgccgccaacgccgccggaggccatccacaacattaacatcaccgccagcgcaccaatcagcagcattaacgcctgcgataaggcggtgagttcagactgtcggcgttgggcctcatgccattgtaattcggtggcttccatttgcgcccgatagcgtttgctggcgccaaaaatggtgagttccgcctggccctgtaaccatgacgtgagctgctggcgatactgaccgcgtagatgcgtcagattttggccggtatttttgccggcgcgataaaacaccggcggcataataaacagcgtcaacagcataatgccgcccagcgtgatcgccagcgtcacgtcgagaacgctaagccccagggtgacaatcataatcactacaaaagcgccgaccagcggggagatgacgcgcaaatagagatggtccagcgtgtcgacgtcggcaacgatgcggttcagcagttcaccttgctgataacgcgccagactcgcgggggagagtggtagaagtttgctaaaggtataaatacgcagatgttgcagtacgcggaacgtggcgtcatgacttaccagacgttcaaaataacgaccagcggtacgggtaatggccgcgccgcgcacgccggctgccgggagcatatagttaaaactgtaaattcccgcgaagcctgcgatagcggacgcggacaggaaccagccggaaagcgtcagcagcccgatactggcaagcagtgtcaggattgccagcgcaattcccagcgttagcatccatttatggcgtttataaagcgtcagataagggagtagcgcgcgcatttaaatatcctcctgacggtgagccaataacgtcgcaaaagcgccgttggcggcgctgagttcagcataactgccttgttcgacaatcgcgccatcttgcataacccagatagcgtcccagtcggcgagatcttccaactgatgcgtcaccattaatgtggtctggcgttttgacgccgcttttaacgcctgcatgacgcgttgctcgctgtgagcgtccaggcttgccgccggttcatccagcagtagcagttgacagggattaagtagcgcacgggcgaccgctacacgctgtgcctggccgacggaaagtctgctggcatgattgccgagcggggtgtctactccctgcggcagcagcgataaaaactcgcttacccatgcggcgtcaagcgcggcataaagttcctgctcgctggcgtccgggcgcgccagtaatacattttcgcgtagcgtcgctgcaggtaattgcgggttttgcccaacccaggagagatgctggcgccaggattccggcgagagatcgcgaagctcgacaccgttaatacgcaaagatccctgataggagagaaaaccggataatacattcaacagagagcttttaccggaaccgctgcgtcctaccaggacggcgcgttctcctgccgctaatgagaaattcagcggcccggcaagcgttttgccttctggcgaggtgataataagattgactgcgtcaatggttacaggttcgttttccgccagctcaacttcgccgcgcgccgggtgggcaaggggtgtttccagaaacgtcttcagactatccgccgcgccaaccgcctgcgccttagcatggtaaaacgtgccgaggtcgcgtaacggctggaaaaactccggcgcgaggatcaaggcgaggaacccggcggcgagcgtcacgccggtaccgtaatgaccaaagttcagttcgcccaggtaagagaagccaaaataaacggcgaccagcgcaatagaaagcgaggtgaaaaattccagcacgccggaagataaaaaggcgaggcgcagtacttccatcgtgcgctgacgaaaatcctgcgatgctgcgcgaatgctttcggtttccgcttctccacgaccgaaaattcgcagcgtttccatcccgcgcagacggtcaagaaaatggccgcttagccgggcaagcgccaggaaattgcggcggttggcgtcagccgcgcccatccccaccattgccataaataggggaatgagcggggcggtgcccagcagaatcagcgccgccgcccaatttgacgggaaaatcgccgccacgattaagagcggtacgcaaacggcaagcgccatttgcggcagatagcgcgcataatagtcatgcatatcgtcaatctgttccaataccagcgtcgcccagctaccggcgggcttgccctgaatccaggctgggccggcttgctgcagacgatccaacacctgacggcggatctcaaagcgaatatgttgtccggcatgaaaaccgacgcgctcgcgcaaccacaccacccaggcgcggaggacaaagaccagtatcagcaggataaaagggagcaacagcgcttcccgtggaatgttctccatgatcatatgttgcaggatacgcgccatgatccaggcctgagcgacaattaatacgccactcatgaaccccaacaggcgggaaatattcaaccaccgttgggagattacgctttgctgttttaaccagcgggtcagctctttttgacgggttttattcattgcacgcttagcaggtgagttattggaatttcaggcagggcaatgttacaacgacgcaaaaataaaggcgacttatagtcgccttttttacttttgttactgatttgtaaaaactatttgctcgcgtcggccagaccatcgagatagcgttcagcatccagcgccgccatacagcccgtacctgcagaggtgatcgcctgacggtaaatatgatccatgacgtcacccgccgcgaatacgccagggatgctggtttgtgtggcgttgccatgggtgccggactgaactttgatataaccattttccagctcaagctggccttcgaagagcgccgtgtttgggctatgaccgatggctacgaaaagtccggcgatgtccagcgtctcgatattatcgctctgctgcgtgtcgcgaagacgcagaccggtgacgcccatctgatcgccggtcacttcttccagcgtccggttggtgtgcagaatgatattgccattttcgactttatccatcaggcgcttaatgaggattttttcagcgcggaaaccgtcacggcgatggataaggtgcacttccgaagcgatgttggacagataaagcgcttcttcaaccgcggtgttgccgccgccgatcaccgctactttctgattgcggtagaagaaaccgtcgcaggttgcgcaggcggaaacgccgcgccctttaaaggcttcttccgatggcagccccagatagcgcgcggaagcgccggtcgcaatgatcaacgcatcacaagtgtactctgcgctgtcacctgtcagacggaacggacgattttgcagatccacgttgttgatgtgatcaaaaattatctcggtttcaaattttgccgcatgttcatgcatgcgttccatcagcagcgggccggtcaaatcgtttggatcgccgggccagttttccacttccgtcgtggtagtcagttgaccgcctttttccataccggtaataagtaccggctgtaaatttgcgcgcgcggcatacaccgccgcggtatatcccgccggtcctgagcccagaataagcagcttactgtgtttggtcgtgcccatgagatccccatagttgttggcagacaatgagcagaattgtagggaatttacagacgtaaaaaaagagcataacgattttgttaacaatatgtgtaatagcatgaaccgatgaacggccgcgacagcgacgttatcatcacaaactttaattaaaatcggtaacttataaggtgacgaaatgacagtttaccgccctctctaatgaataactggcatgttgtactaaaaatcgatgttttgctttgacaatcacctgctgttttgcgaaaacattcgaggaagaaaaaactgtgttatgtatgtgctgcataatcatgcatgtaaataccatgtttaccgggctagtgaaatctacgcatggcgtggacagacgccattcgtgatgtcgatagctgccgcgaggcaacggtcttctcaccatagaccaggcattgcgcgccgttaatccctctgggtttcggtctatcgtgatgggcagcgactctgaacagtgatgtgagtagagtcaggcaggagtagggaaggaatacagagagacaataataatggtagatagcaagaagcgccctggcaaagatctcgaccgtatcgatcgtaacattcttaatgaactgcaaaaggatgggcgtatttccaacgtcgagctttctaaacgagtaggactttcgccgacaccttgccttgagcgtgtgcgtcggctggagcgacaggggtttatccagggctatacggcgctgttgaacccgcattatctggatgcgtcacttctggtattcgttgagattaccttaaatcgcggcgcgccggatgtgtttgaacagtttaatgccgccgtgcaaaagcttgaagagattcaggagtgtcatttggtttccggcgatttcgactacctgttgaaaacccgtgtaccggatatgtcagcgtatcgaaaactattgggagagacgttgctgcgcttgccaggtgtgaacgacacccgaacttacgtagtgatggaagaggtaaaacagagtaatcgtctggttattaagacacgctaacacggaacaggtgcaaaatcgctgtagtttgattacactcctgttaatccatacagcaacagtgccggggcaacccggtgctgttgtccgttttagcatcgggcgggaaaagcctggaacctggagagccttttttgagccaggaatatactgaagacaaagacgtcacattgacgaagttaagcagcgggcgccgacttttggaagcgttgttgatacttattgccctttttgccgtctggttgatggcggccttgttgagctttaacccttcggaccccagttggtcgcaaaccgcctggcatgaacccatccataatttaggcggcgcgccgggcgcgtggctggccgatacactgttctttatttttggcgtaatggcctacaccatccctgtcattattgtcggcgggtgttggtttgcgtggcgtcatcagtctacggatgattacatcgactattttgctgtgtcgctacgccttatcggcgtgctggcgctgattctcacttcctgcggtctggcggccattaatgccgacgatatctggtatttcgcctccggcggcgtaattggcagcctgttaagcaccacgctgcagccgttgttgcatagtagcggcggaacgataatgcttctctgtatttgggctgccgggctgacgctctttaccggctggtcctgggtcagtatcgccgaaaaattaggcggctggctgcttaatatactgaccttcgccagcaaccgtacccggcgtgatgatacgtgggttgacgacgaagagtatgatgacgaatacgatgaagaaaccgacggcgtgcagcgtgaatctcgccgggcgcgtattttgcgcggcgcgttggcgcgtcgtaagcgactggctgaaaaattcagcaatccacggggccgtcagaccgatgccgcgctcttttccggcaaacggatggatgatgacgaggacattcagtatagcgcgcgcggcgtcgctgccgatcccgacgacgttctgttttcgggcaaccgtgcgacgcagccggaatatgatgaatatgatccgctgttaaacggccattctgtcaccgaaccggtcgccgccgctgcggctgcaactgccgtcacccagacgtgggcagcgtccgccgatcccataatgcaaacgccgcccatgcctggggctgagccggttgtcgcgcaaccgaccgtggagtggcagcccgtaccggggccgcaaaccggcgaaccggttatcgcgcctgcgccggaggggtatcagccgcatccgcaatatgctcaaccgcaggaggcgcaaagtgcgccgtggcagcaacctgtgcctgtcgcttccgcgccgcaatacgccgcgacgccagcgaccgcagcagaatatgactctcttgcgccgcaggaaacacagccgcaatggcagccggagccgacccatcagccgacgccggtttatcagccggagccgatagcggctgaaccttctcacatgccgccgccggttatcgaacagccggttgccaccgagcctgaacctgacacagaagagaccagacctgcccgtcctccgctttactattttgaagaggtggaagagaaacgcgcccgtgagcgcgaacaactggcggcatggtatcaaccgattccggagccggtaaaagagaacgtgccggtcaaacctacggtatctgtcgcgccgtccataccgccagtggaagcggtagccgccgccgcgtcgcttgacgcaggtattaagagtggcgccctggcagcaggcgccgcggccgctgcgcctgcatttagtctggctaccggcggcgcgccgcgtccgcaggtgaaagaggggattggtccgcaactgccgcgtccgaaccgcgttcgcgtgccgacccgacgggaactggcatcgtacggtattaagctgccgtcacagaggattgcagaagaaaaagcccgcgaggcggagcgcaatcagtacgagacgggcgcgcagctaaccgatgaagaaatagatgcaatgcatcaggacgagttagcccgtcagtttgcgcagtcgcagcagcatcgttatggtgagacgtatcagcatgatacgcaacaggcagaagatgacgataccgctgcggaagctgaattagcccgccagtttgccgcttcgcaacagcagcgctattccggcgagcaacccgctggcgcgcagccgttctcactggacgatctggatttctcgccaatgaaagtattggttgatgaaggtccgcacgaaccgctgttcacgccgggtgtcatgcccgagtcaacgcctgttcagcaaccggtagcgccgcagcctcagccacagtaccagcagccgcaacagccggtagcgccgcaaccgcagtatcagcagccgcagcagccggtagcgccgcagccgcagtatcagcagccgcaacagccggtagcgcctcagccgcagtatcagcagccgcaacagccggtagcgccgcagccgcagtatcagcagccgcaacagccggtagcgccgcagccgcagtatcagcagccgcagcagccggtagcgccgcagccacagtatcagcagccgcagcagccggtagcgccgcagccacagtatcagcagccggtagcgccgcagccacagtatcagcagccgcaacagccgacagcgccgcaagacagcttgatccacccgctgttgatgcgtaacggcgacagccgtccattacagcgtccgacgacgccgctgccttcgttagatcttctgacaccgccgccgagcgaagttgaaccggtagatacctttgcgctggaacaaatggcgcgtctggttgaagcgcgtctggcggatttccgcattaaagctgatgtggtgaactattcgccaggcccggtcattactcgttttgaactgaatctggccccgggcgttaaagcagcgcgtatctccaacctttcccgggatctggcgcgctcattgtcaacggtagccgtacgcgttgtggaagtcattccaggcaaaccttacgtagggttggaattgccgaacaagaaacggcaaaccgtttatctgcgcgaagtgttggataacgccaaattccgcgagaatccgtcgccgcttaccgtggtgttaggtaaggatatcgcgggcgatccggtagtggcggatctggcgaaaatgcctcacctgctggtggccggtacgaccggttccggtaagtcggtcggggttaacgccatgatcctcagtatgctgtataaagcgcagccggaagacgttcgctttatcatgatcgacccgaaaatgttagaactctcggtctatgaaggtataccgcatctgctgacggaagttgttaccgacatgaaagacgcggctaacgcgttacgctggagcgtcaatgagatggagcgtcgctataagctgatgtccgcgctcggcgtgcgtaatctggctggttataacgagaaaatcgccgaagcggcccgcatgggacgtccgattccggacccgtactggaagccgggcgacagtatggatgttcagcatccggttctggaaaaactgccgtatatcgtggtactggttgatgaatttgccgacctgatgatgaccgttggtaaaaaagttgaagagctgatcgcgcgtctggcgcagaaagcgcgcgccgcggggattcacctggtactggcgacgcagcgtccgtcggtcgatgtgattactggtttaattaaagccaacattccaacccgtatcgcttttaccgtatccagcaagatcgactcccgcaccattcttgatcagggtggcgctgagtcgctgctaggtatgggggacatgctctactccggaccaaactccaccatgccggtacgtgtccatggggcgtttgtgcgtgaccaggaagtccatgcggtggttcaggactggaaagcgcgcggtcgtccgcaatatgtggatggcattacctccgacagcgaaagcgaaggtggcggtggcggttttgacggcggcgaagaattagatgcgctattcgatcaggccgttaatttcgtcactcagaagcgaaaagcgtccatttccggcgttcagcgtcagttccgcatcggctataaccgtgcggcgcgtattatcgaacagatggaagcgcagggtattgtcagcgctcaggggcataacggtaatcgtgaagtgctggctccgccgccttttgagtaaacctgtaagccggatggcgctgtgcaggctgccatccggcaacaaaattcagtattttcttctttcctcatgctgatttttggcctggaatagaaagcaaaaggagctcctggtcgggagtgtcgaaacctgaggaataatgatgaaaaaaatggcaatcgcctgtgcattactttcaagcgttgtagccagcagcgtatgggctgacgccgccagctctctgaaaagccgtctggataaagtgagcagctttcatgccacctttactcaaaaagtcaccgatggcagcggtgccgcggtgcaggagggacagggtgatttatgggttaagcggccaaatctattcaactggcatatgacgcaacctgacgagagtattctggtttctgacggcaaaacgttatggttctataacccgtttgtagaacaggctaccgccacgtggttgaaagatgccactggaaatacaccgtttatgctgattgcccgcaaccaggccagcgactggcagcagtataatattaagcaggacggcgataattttgtgctgacgccgaaagccagcaacggcaatctgaaacagttcaccatcaatgtgggacgcgacgggactatccaccagtttagcgccgtagaacaagacgatcagcgtagcgcctatcagctaaaatcccagcaaaacggcgcggttgatccgtcaaaatttacgtttactccgccgcaaggggtaacgatagacgaccaacgtaagtagaggcgatgagtgagcaatctgtcgctcgatttttctgataatacgtttcaaccgctggccgcgcgaatgcggccggaaaatttagcgcagtatatcggccagcagcatttgctggccgcaggtaagccgttgcctcgcgctattgaggccgggcatctgcactccatgattttatgggggccgccagggacggggaaaaccacgctcgctgaagtgatcgcccgctacgccagcgccgatgtcgagcgtatttccgccgtcacttctggggtaaaagagattcgcgaagctatcgagcgcgcccgccagaatcgtaatgccggtcgccgtaccatcctgtttgtcgatgaagtgcatcgctttaacaaaagccagcaggacgcctttttaccgcatatcgaagatggcactatcacctttatcggcgcgaccacggaaaatccctcttttgagctgaactcagcgctcttgtcgcgagcgcgggtctatctgctgaaatcgttgaccactgacgatattgagcaagtactggaccaggcgatgcaggacaaaacgcgtggttacggcgatcaggatatcgtgttaccggatgagacacggcgagcgattgctgagctggtcaatggcgacgcgcggcgcgccttaaatacgctggaaatgatggctgatatggcggaggcggatgacagcggcaaacgcgttttattgcccgccttgttgaccgagatcgccggcgagcgcagcgcgcgttttgataacaaaggcgatcgcttctacgatcttatttccgccttacataaatcagtgcgcggcagcgcgccggatgccgccctctattggtatgcccgtatcattactgcgggaggcgatccgctgtacgtggcgcgtcgctgcctggcgattgcctcggaagatgtgggtaatgcagatccgcgcgcgatgcaggtcgccattgccgcgtgggattgtttcacccgcgttggcccggctgaaggcgaaagggcgatcgcgcaggctatcgtttatctcgcctgcgcaccgaagagcaacgccgtctataccgcctttaaggctgcgctggccgacgcgcgcgaacgtcctgattatgacgttcctgtccatctgcgtaatgcgccaaccaaactgatgaaagagatgggctatggccaggagtaccgctatgcccacgatgagcccaatgcctatgctgcgggtgaagtgtacttcccgccggaaatcgcgcaaacgcgctattatcatccgacaaatcgtggtctggaaggcaagattggcgaaaagctcgcctggctggctgaacaggatcaaaatagccccacaaaacgctaccgctagtgtaaacgttgcggtaaggttatctctaaatatgatgctccaggtatcatggcgttgatgatgaatctcgttatgcctgatagcacgttgcttatgaggtccgcgggtatagcgcaatggatgcgttgttgctgtcgtcggtctggtaaggcgaaaacgtcgctattacgtaaacgcggtttacgttcatcaatacaatcagaggcgatcatcaattgatcgcgtttccttttattattcgataagcacaggataagcatgctcgatcccaatctgctgcgtaatgagccagacgcagtcgctgaaaaactggcacgccggggctttaagctggatgtagataagctgcgcgctcttgaagagcgtcgtaaagttttgcaggtcaacacggaaaacctgcaggcggagcgtaattctcgatcgaaatccatcggccaggcgaaagcgcgcggggaagatatcgagcctttacgcctggaagtgaataaactgggcgaagagctggatgcggcgaaagccgagctggataccttgctggcggagatccgcgatatcgcactgaccatcccaaacctgcctgcggatgaagtgccggtaggtaaagatgaaaacgacaacgttgaagtcagccgctggggtaccccgcgtgagtttgattttgaaatccgcgatcacgtcaccttaggggaaatgcactccggcctcgactttgccgccgcggttaagctgaccggctcccgttttgtggtgatgaaaggacagattgcgcgtatgcatcgcgcattgtcgcagttcatgttggatctgcatacggaacagcacggctatagcgaaaactacgtgccgtatctggttaaccacgacacgctgtatggcaccggtcaattgccgaaattcgcaggcgacttgttccatacccgtccgctggaagaagaagcagacagcagcaactatgctttgatcccgacggcggaggttccgctgaccaatctggtacgcgatgaaatcatcgacgaagatcagctgccgattaaaatgacggcgcatacgccttgtttccgttctgaagcaggttcttatggtcgtgatacccgtggcctgattcgtatgcatcagtttgacaaagttgagatggtgcagatcgttcgcccggaagattctatggctgcgttggaagagatgaccggccacgcggaaaaagtgctccagctactgggactgccgtaccgtaaaatcattctgtgcactggcgatatgggcttcggcgcctgcaaaacctatgacctcgaagtctgggttccggcgcagaatacctaccgcgagatctcttcctgctctaacgtctgggacttccaggcgcgtcgtatgcaggcacgttgtcgcagcaagtccgacaaaaagacccgtctggtccataccctgaatggttctggtctggcggtaggtcgtaccctggtggctgtgatggaaaactatcagcaggctgatggccgcattgaagtgccggaagtattacgtccgtacatgaacggactggaatatatcggctaatcctcgctttctcctcttctaaaaagcgccttcgggcgctttttttatgccagtttgataccggacaataatccctaccctattaggggtaatactgatttcgaatgaaggtcagtttttaacactatttttctactttttcgatatatatcagactttatagcgatgctatcgctatataaaattctatacatcgttttattgtttttttattgtgagcagcagagtgagcccttatgaaaactaagatccctgatgccgtgctggcagccgaggtgagccgtcgtggtttagtcaaaaccaccgcgataggcggcctggcgatggccagtagcgcatttaccctgccatttacccgcatcgctaacgccgcagaggcaataagcccggcgaaaaccggcgagaaagtcgtctggagcgcctgtacggtaaactgtggcagccgttgtccgctacgtatgcatgttgtggatggcgaaatcaaatatgtagaaacggataataccggaaacgatgattacgatggcctgcaccaggttcgcgcctgcctgcgcggtcgttctatgcgccgtcgcgtctataacccggatcggctcaagtatccgatgaagcgcgtcggcgcgcgcggcgaaggtaaatttgagcgtattagctgggacgaagcctacgatatcattgccaccaatatgcagcgtcttatcaaagagtatggcaacgagtccatttatctgaactatggcacgggaacgctgggcggcactttgacacgttcatggccgccaggaaaaacgctggtcgctcgtctgatgaactgctgcggcggttatcttaatcactacggtgattactcttccgcgcaaatcgcagcgggtctgaactacacctatggcggctgggcggatggcaatagtccgtccgacattgaaaacagtaagctggtggtattgtttggcaataaccctggcgaaacccgcatgagcgggggcggtgtaacgtattatcttgaacaggcgcggcagaaatcaaacgcgcggatgatcattatcgaccctcgttacaccgacactggcgctggtcgcgaagatgagtggattccgattcgtccaggtaccgatgcggcgctggtcaatggtctggcatatgtcttaatcaccgagaacatggtcgatcagccgttcctggataaatattgcgttggttatgacgaaaaaaccttgcctgccagcgcgccgaaaaacggtcactacaaagcctatattctgggccagggtaaagacggtatcgcgaagacgccggagtgggcggcgcaaattaccggtatcccggcggatcgcattattaagctggcgcgagaaatcggcagcgctaaacccgcctatatttgccagggatggggaccacaacgtcatgctaatggagaaatcgccacgcgcgccatctcgatgctggcgatcctgacgggtaatgttgggattaacggaggtaatagcggcgcgcgcgaagggtcttatgccctgccatttgaacgtatgcccacgttagaaaacccggttgaaaccagcatctccatgtttatgtggaccgatgccattgaacgcggcccggaaatgacggcgctgcgtgatggcgtgcgggggaaagataagctggacgtgccgatcaaaatgatctggaactatgctggcaactgtttgattaaccagcactctgagattaaccgcacccacgaaatcctgcaggatgacaagaaatgcgaaatgatcgtcgttatcgactgtcatatgacctcgtcggcaaaatacgccgatattctgttgcctgattgcactgcttctgagcagatggactttgcgctggatgcctcctgcgggaacatgtcttacgttatcttcactgaccaggcgattaaaccgcgcttcgagtgtaagacgatttatgagatgaccagcgaactggcgaaacgtcttggcgtggaacaacagtttaccgaaggacggacgcaagaagagtggatgcgtcatctgtacgaacagtcgcgtaaatccattccgaatctgcccacctttgaggagttccgtaagcaaggcatcttcaaacagcgtgaccccgaaggccaccatgtcgcctataaagacttccgcgaagatccgcaagcgaatccacttacaacgccatcgggcaagattgaaatctattcacaggcgttggcggatatcgccgccacctgggagctgccggaaggcgacgtgatcgatccattaccgatctacacgccaggttttgaaaactataacgatccgctaacggataaattcccgctgcagttgacgggtttccactataaagcgcgtgtacattccacttatggcaacgtagacgtactgaaagccgcctgtcgccaggaaatgtggattaacccaatggatgcgcagaaacgcggtatcaacaatggcgacaaagtccgcatcttcaacgatcgcggcgaagtacatatcgaggctaaagtgacgccgcgcatgatgccgggcgtggtcgccctgggagaaggcgcatggtatgacccggatgcaaaacgcgtggatcagggcggatgtattaacgtactgacgacccaacgtccttctccgctggcgaaggggaacccgtcacatacgaacctcgttcaggttgaaaaggcgtaaggagtaaccgatgacaacccagtatggattttttattgattccagccgttgcaccggttgcaaaacctgcgaactggcctgcaaggactacaaagatttgaccccggatgtcagcttccgccgcatttatgagtatgcgggcggcgactggcaggaagataacggcgtctggcaccagaacgtctttgcctactatctctccatctcctgtaaccactgcgaagacccggcctgcaccaaagtctgcccgagcggcgcgatgcacaagcgcgatgacggttttgtggtggtgaacgaagaggtctgtatcggttgccgctactgccacatggcctgcccgtacggcgcgccgcagtacaacgcggccaaaggtcatatgaccaagtgcgatggctgttatgaccgggtggcggaaggtaagaaaccgatttgcgtcgaatcctgcccgctgcgggcgctggactttggtcctatcgatgaactgcgcaaaaaacacggtgagctggctgccgtcgcgccgttgccgcgcgcgcatttcacgaagccgaatattgtgattaaacccaacgccaacagccgcccgaccggggacaccaccggttatctggccaatccgaaggaggtataagatgggaagtggatggcatgaatggccgttgatgatcttcacggtctttggtcagtgcgtggccggtggttttattgttctggctctggcgctgatgaagggcgacctgcgcgcggaaacgcagcagcgggtgatcgcctgtatgtttggtctgtgggtgctgatggggattggctttatcgcctcgatgctgcatctgggctcgccgatgcgcgcgtttaactcgcttaaccgcgtgggtgcttccgcactgagcaatgaaattgccagcggctcggtgttttttgcggtcggcgggatcggctggctgctggcggtactgaaaaagctgccgccggcactgcgcacactctggctgattatcacgatggtactgggcgtcgtcttcgtctggatgatggtacgcgtctataacagcatcgatacagtaccgacctggtatagcgtctggacgccgctgggcttcttcctgacgctctttatgggtggcccgctactgggttatctgctgctgcgcatcgcgggcgtgaacggttgggcgatgcgtttgttgcctgcggtttcggtgctggcgctggtggttattgccattatggtggccatgcagggcgcggaactggcgacgattcacagttccattcagcaggcgtctgctctggtgccggattatggttcgctgatggcctggcgtatggtgctgcttgcggcggcgttgtgctgctggattgtgccacagttaaaagggtatcaacctgcggtaccgttgctctctgtcgccttcattctgatgctggcgggggaattgattggccgcggcgtattctatgggctgcatatgaccgtgggcatggcggtagccagttaacgcgttgacgcgcattcggcctgcagaacgtgcaggccgaattcgcctttagccgccatcaatctaaggaatataaccggggcggagaaggcgcatataaatccatagagaagaaaacgaagctaaaggaaccatgaaatttttcgactgaacaaaacgccgattttgcgggttagattaataaaaacaagaggatgaatttttagcctttcaatatattcacgcgcagaataagtaaatcaaatcgatagtctcaaaacttgcggatcgcccatgcggagccgattgacaatgtttttggcgatggcatgatgcgcatgaaatttgaacttcctcacggtttttattcatgtccacctatacccgtcccgtcatgcttttgctgtgcgggctacttttgttgactctggccattgcggtactgaatacgcttgtgccgctgtggcttgctcaggcaaaccttccgacctggcaggtggggatggtcagctcgtcttattttaccggcaatctggtcgggacgttatttaccgggtatttaattaaacgcattgggtttaaccgtagctattatcttgcctcgctgatcttcgccgcgggttgtgtcggattgggggtgatggtggggttctggagctggatgagctggcgttttattgccggtatcggctgcgccatgatttgggtggttgtcgagagcgcgttgatgtgcagcggaacctcgcataatcgcgggcgcctgctggctgcctatatgatggtctattatatggggaccttccttggacaattattggtcagtaaagtatctggtgaattgctgcacgttcttccctgggtgaccggaatgattctggcgggaattctgccgctactctttacccgaattgtaaatcagcaaacgcaggcacgtcattcctcttctattagcgccatgctgaagctacgccaggcgcgtcttggcgtgaatggttgtattatttccggcattgttcttggttcattatatggcctgatgccgttatatctgaagcatcaggggatggctaacgccagcatcggtttctggatggcggtgctggtgagtgccggtattttggggcaatggccaatgggacgtctggcggacaaatttggtcgcttgctggtgttacgcgtacaggtattcgttgtcatactcggcagtattgccatgttaacccaggcggcgatggcgccagctctgtttattctgggggcggcgggttttacgctttatcccgttgcaatggcctgggcctgtgaaaaagtcgaacaccaccagcttgtggcaatgaaccaggcgctgttgttaagttatacggtagggagcctgttggggccgtcttttgctgcgatgttaatgcagaattattcagataatctgctgtttattatgatcgccagcgtatcgtttatttatctgctgatgctgttacgtaacgccggccagacgcctaatcctgtcgcccacatctgactgttctctgaatcgtatgcaggacgtgagtcttgcatactctttgtttatgttttacgtgaaataattgacctgcataattttcttgctttactgaaaaataaaatgtgccgaaggttataattttgcgctcctctattttctctcttcgtctttaccgcgcataattccccgcttcatttatagtaatagcattgtgttcacgaaggatcgcgttatgccgaatgtgcaggaaaaacagttgcgatggtacaacatcgccttgatgtcgtttattaccgtttggggattcggcaatgttgtcaataactatgctaaccaggggttagtggttgtcttctcctgggtgtttatttttgcgctctattttattccttatgccttaatcgtggggcaactgggctcaaccttcaaagagggaaaagggggcgtcagtacctggattaagcatacgatggggccggggttggcttaccttgcggcatggacttattgggtcgtgcatattccctacctggcgcaaaagccgcaggcgatactcattgcattgggatgggctttaaaaggcgacggctcgttgataaaagaatataccgtcgttgccttgcaggggctgacgctggcattgtttgttttctttatgtgggttgcttcccgggggatgaaatcgctaaaggttgttgggtctgtggccggaattgccatgtttatcatgtcaattttatatgttgtgatggcagtgaccgcgccagcaattacaaacgttgaaattgcgaccactaacatcacctggcagtcatttattcctcatatcgattttacctatatcaccaccatctctatgttggtctttgcggttggtggggcagagaagatctcgccttatgtcaaccagacgcggaatccaggaaaagaatttccgaaggggatgctctttttagccgtcatggttgcggtctgcgctatcctcggttcgttggcgatgggaatgatgtttgattcccggcatatacctgacgatttaatgaccaatgggcaatattatgcattccagaaattgggtgagtattaccatatgggtaattcattaatggttatttatgccattgccaatactctggggcaaatcgccgcgctggtgttttctattgatgcgccactgaaagttttactgggtgatgcagacactaaatatatcccgcagcgcttatgtcgtactaacgcttcaggtacgcctgttaacggttatttgctgacattagtgttggtcgctatcttgattatgttgccaacgcttggcatcggcgatatgaacaacctgtacaaatggctgcttaatctcaattcagtcgttatgccgctgcgctatctgtgggtatttgtcgcctttattgccgtcattcgactggcgcaaaagtacaaacccgaatatgtgtttattcgcaaccgggcgttggcgttaactgtgggaatatggtgttttgccttcaccgcgtttgcctgccttaccggtattttccccaaaatggaggcgttcacgccggagtggacattccagctgacgttgaacatcgtgacgccttttgtcctggtcgggttgggattaattttcccactgctggcgcgtagaaacacataacgacgctcttttccacggcgctcctgtcaggcgagcgccttttaaggttacaggtgcctgggttccaggcggagaccacggtattaacaggcgccgggggcagcaatagttgtcagaccttcaacccagcagcagataagcgactctgtatttaatacctggttagcgcaatattgttaaccatgcctgtctgatggcggggtcgggtattttagcggtaagagcgttatccagacagcaaaacggctaccgtcatgggtagccgtttaaaagcgggtaagatagcaggcgattaatacatcactttatgaccatactgctcaagaataccctttacacgctccatggtctcttttttaggcggcttcacgccatccagtttatattcttcgcccattgccacccatttatgtttgcccagctcatgatagggcaacagttcgattttttcgacattacccatatcgcgggtaaactcgcccaggcgatgcgcggaatcatcgtcgtcagaccagccgggaacgacaacgtaacggatccagaccttcacatttttctttgataaatactgcgcgaattccagcgtccggtgattagagacaccgaccagattctggtggatctcatcattcatctgcttgagatcgagcatcaccagatcggtaacgtccaacagttcatcaatcaccgggtcataacggcgcacaaagccgttggtgtcgagacaggtgtggataccttcttttttacaggcgcgaaaccagtcgcgtacaaattctgcctgcaaaatggcctcgccgccggatgccgtcacgccgccgccagaagcattcataaaatgccgataggtcaccacctctttcattaagtcttcaacggtgatttctttaccgccatgcgtatcccatgtgtcgcggttatggcaatacaggcagcgcatcaggcagccttgaaaaaaggtaataaagcggatgcctgggccatcaacggtgccacaggactcaaaggagtgaatgcgaccaataaccggctttttatcagcagttactgcaacactttcatttgtaatacaattggttaagttactcatatcgcttcggctagctctaaataacatggggtttatggacacattccgggcatgttgagcaccctggtaagggggttgcatcctgtaaaaaagcggtactgcgagcgtaaattttggactacagaatgtgtggctgttccagaatgtgctgcaatggagctattttacctctattcagtataaaatatacggcaaatctatgctgcataactcgcaccgccagaaattctggctcattcatcagctcgtaacgcctcaaccgcaatacatactgcaagtgtatcatccatagcgccctggttttactgtttatgatccgcctcttttttcgaatggttggcgccgttttgttgtggtcagaacgaaaataattctcaacataattcagatgtgtccaaagaacgttatgcgctgtccagcgcctggcgtcgcattcaacgcgcaatcaggtgtaaatctgatgtcatttctaaacccaggctgattcaatctcttaaatagagtgtggttttaatcaaaaaatgagagcaacggattggatcttgctttcgcggtaaataatcaagggagttattatgccagttacgttaagttttggtaatcgtcataactatgaaattaatcattcacggctagcccgtttgatgagtcctgataaagaagaagcgctatacatgggggtatgggatagatttaaggactgcttcagaacacacaaaaaacaagaggtgctggaggtattatatacactcatccatggatgtgaacgtgaaaatcaagctgaacttaatgttgatataaccggcatggagaagatacatgcctttacacaattaaaagaatatgctaatccatctcaacaagaccgctttgttatgcgttttgatatgaatcagacacaagttttatttgagattgatggcaaggttattgataaatgtaatttgcatcgtctcctcaatgtttcagaaaactgtatttttaaagtgatggaagaagatgaagaagagttgtttcttaaaatatgtattaagtatggagaaaaaatttctcgctatccagaattattagaaggatttgctaataaacttaaagatgcagttaatgaggatgatgacgttaaggatgaagtttataagcttatgcgatctggagaagatcgaaaaatggaatgtgttgaatggaatggtactcttactgaagaggagaagaataaactacgctgtcttcaaatggggtcttttaatattactacccaattttttaaaataggttactgggaattagagggggaagtcctgtttgatatggttcatccaacacttagctatctgctacaagcatataaaccgtcattgtcatctgatttaatagaaactaacaccatgctgttttctgatgtattaaataaggattatgatgattatcaaaataataaaagagaaattgatgctattctaagaagaatatatagatcacataataacactttatttataagtgaaaagtcgagttgtcgcaatatgcttatataaaaagtcattaaaaaggccccactgatatggagccttttttgtacgctttttatggcgtaatttcagtcaaacccattacatggtctgcgtgaaggtacgagtaataacgtcctgctgctgttctttcgtcagggagttaaaacgtactgcgtaaccagatacacggatggtcagctgcggatatttttccggatgttccatcgcgtccagcagcatttcacggttcatgacgttgacgttcaggtgctgaccgccttcgatggacgcttcgtggtggaagtaaccatccatcagacctgccaggttagtcttacgaacttcgtcgtctttacccagtgcgttcggaacgatagagaaggtataagaaataccatctttcgcgtaagcaaatggcagtttagcaacggaggtcagagaagcgacagcgcctttctggtcacgaccgtgcatcgggttagcacctggtccgaacggcgcgccagcgcgacgaccatccggggtgttaccggttttcttaccatacacaacgttagaagtaatggtcagaacagactgtgtcgggatagcgccacggtaggtggtcagtttctgaattttcttcatgaaacgttctaccaggtcaaccgccatgtcatctacacgagcgtcgttgttaccaaactgcgggtattcgccttcgatttcgaagtcgatagccagaccatcttcgtcacgaatcggtttaactttcgcatatttgatggcagacagggagtcagcagcaacggacagacctgcgataccacacgccatggtgcggataacgtcacggtcgtgcagcgccatcagagaggcttcgtagctgtacttgtcgtgcatgtagtggataacgttcagcgcggtgacatactgtttagccagccagtccatgaagtgatccatgcggtccatcacttcgtcgaagttcagaacatcgcctttgatcggttcggatttcggaccaacctgcattttcagtttttcatcaacgccgccgttgatagcgtacagcatggttttcgccaggtttgcacgcgcgccgaagaactgcatttgtttaccaacgatcatcgggcttacgcagcatgcgatagcgtagtcatcgttgttgaagtccggacgcatcaggtcatcgttctcgtactgcagagaagaagtgtcgatggagactttagcggcgaatttcttgaagttcagcggcagtttttcagaccacagaacggtgatgttcggctccggagacggccccatggtgtacagggtgttcaggaaacggaagctgtttttggtgaccagagtacggccatcaacgcccataccgccgatagattcggttgcccaaatcgggtcgccggagaacagttcatcatattcaggagtacgcaggaagcgaaccatacgcagtttcatgaccaggtggtcaatcatttcctgtgcgtcttgctcggtgattttgcctgctttcaggtcacgttcgatgtacgcatccaggaaggtggatacacgaccgaaggacattgctgcgccgttctgagatttaaccgcagccaggtaaccgaagtaagtccactggattgcttcctgagcgttagtcgccggaccagagatatcgcagccgtatttagctgccatttctttgatctgacccagagcgcggtgctgttcagcgatttcttcacgcagacggatagtcgcttccagatttacgccgttttccagatcggattgcagagacgtaaactgtgcgaatttgtctttcatcaggtagtcgataccgtacagcgctacgcgacggtagtcaccgatgatacggccacggccatacgcatccggcagaccggtcagaacgccggatttacggcaacgcaggatgtccggagtataaacgtcgaacacgccctggttgtgagtcttacggtattcggtgaagatttttttgatcattgggtccagctcgcgattgtacgctttgcaggaaccttcaaccattttgatgccgccgaacgggataatcgcacgcttcagcggagcttcagtctgcagaccaacaattttctcaagcgctttgttgatgtagccagcgtcgtgagaagtgatggtggaagcaacggaggtgtcaaagtcaacaggcgcgtgagtgcggttttcctgtttaacgccttccattacgctgtcccacagcttggtggtcgcgtcagtagcgccagccaggaaggactcgtcaccctcatacggagtgtagtttttctgaatgaagtcacggacgtttacttcattctgccagtcacctttggtaaaaccttcccaggctgtggctaacttttcattaagctcggacatgtaacacctaccttcttaagtggattttttatttactgcgtgtaatgggcatcaacagattaatgatgctcgttaccacgcaggtaaatgacccagtatgtcaacccgaccaacaaaccgccgccgataatattaccgatcgtgaccggaatcaggttatcagtgatgaagctcatcacggtcaggtgagaaaaactttccggagacgaaccaaccgcggtccaaaactccggtgtagcaaaatcgcgtattacaatacccataggaatcataaacatgtttgcgatactgtgctcaaaaccgctggcgacaaacatggcgacgggcagtaccatgatgaacgctttgtccatcaggctacgacctgagtagctcatccacacggccagacaaaccatcaggttcgccagaataccgaggcagacagcttcaataaaagtgtggtgcattttgtggtcggcggtttgcaggacgttaagtccccattgaccgttggcagtcatatactcgccggaaagccacatcagtaacacgaaaagcagagcgccaatcaggttaccaaaatagacgtttaaccagtttttagccagttgcccccaggtgatgcgaccgctagctttagctacaacgatcagaacagtagaggtgaagagatcagcgccgcaaataacacagagaatcagtcccaaagagaaacagatacccccgataagtttcgccatgccataaggcatcgcgccagtaccggttgtcgcagtaatataaaaaacaaaggcaattgaaatgaatacgccggcggtaatcgccagatagaaagtcttaagcggatgtttcgttgctttatagacgcctgcttcttcagccactttggccattgctgcagggagtaaaaggtcaaaagggttgtcagctttcacactaactctctctttattaagtcggcgacgagatactaacaaagcattatagatgagaatttgatatagatcatatctcgcctggcttataggcccgtaagtcgcatggcttttatgcaattacggtgtaactttttgattatcctaataaaaataaattttaaaaattataaatagagttgaattttttcctgactcctcctgctgcacggttaattaatatggagtaatcaacaaataaagtaacatcactatgtcaattaatttaatatcaacaaccaatatttaaccttgttattacatttttcgccgtttagcgaaaataaataaaacggggccgcaaaggcgccccgtaatataacgcagccgagagggtaaacctaccctaagtcactcatatggccttattttgaccagtatgccgctttcgcgcgctgtaatttatcatacgcttttaacaaggactgatgcgccgggaacgcttgtagatcgtggtcgacagccggtagtccataaaaagccgcttcaccgctaagcgcggcgctggcggcctctacagcctctgcgccatacatttttataaaagcattgagatattgcagtggctgacgcgcatcttcttgcgacaggagcagcagagtttgcaggcaacggtaatagtttgcgcgtgtcggactaaagaccgacgaattgaactccatcgtccattctgtccagattagcgcctgctccaaatcgccgcccgctaacgctaacattgcttttaattcgccgacgcgcagtgtataccaaccattgtccgctccggtcgccagacccaacagttcacgcacgcgggtgaaatcgtcaaaaccttcttcatccaattgttcaatcagattgagataatcttctttattccaggcgctaccgggcagcgaaagcagagtctcacgaagatggctacccatattgttgttggccagccacagatcttcggcaggataaatatcagacattcccggtacgataatacgacaggcgtatacgccgagatgctcgtaatcggcaatgtaaacttctttatcttcagcagcaaagatggccatcagcgtggcgaattcttcttcggtagtgccggaaaaactccagtccgtgaacggataatcggcgtcctgtttgaacagatcccaggaaatcaggccgctggagtcgatgaagtgggtctccagattagtgtgctccgcgacttcttcatcatcgaacgttggtggcgtgaagacatcaagatctttcagaccgcgtccctggagtagctcggtcactgtacgctccagcgcaacgccaaagtcaggatgggcgccaaaagaagcaaagcaggtaccgttagccgggttgaacagcacgacgcagataaccggatacttaccgcccagcgagccgtcataggcgaaaatcgggaaaccctcggcttccagcgtggcgattgactccattaccgccggataacgcgccatcacctctgcgggaatctccggcagactgatactttccgcaatgatgcgatttttcacataacgctcgaagacttccgacagtccctgaacgcgggcttcattacgcgtattgccggcggacattccgttagagacgtacaggttgccgatgatattcatcggaatatacacggtctggttatcggactgacgggtaaatggcaggccgcagacgccgcgagcttcattgccggactgaagatcaattaactggcttccggtgagttcattttccggatcgtaaaacgcgcgcagacgggcatcaagcaagccttccggtacgtcgtcattttcagtcagcgggaaccacttttcgttcgggtaatgcacgaatggcccattggcgaccgtttcgccaagccagaaatcagcaaagaagtagttggttgacagacgctcgaagtattcgcccagcgccgaggccagcgccgcttttttggtcgcgccttttccgttggtaaagcataacgcgcactctttatcgcgaatatgcactgaccagacgtttggcaccgggttcagccaggaggcctcttcgatgtgaaagccgaggtcgagtaacttttgctggaagcgggcgatggagtcttccagcgcggcgtctttgccgggaataaatgtttgcgtcatgaaaatcacttttgtcgtacggaaagcgcgcaatgatacgggttttatgtgacgggcgctatctcgccgggacatcggcggaaataaaagtattggctatgcttttacactggcattcacaggaagagcataaaaaatgaaagcatttgatttgcaacgaatggcgctggataacgtgccggtagcgtttttgggggaagtggcgctgcgtagcttttacacctttgttctggtgtttcttttcttaaaggtgacaggacgacgcggcgtacggcaaatgtcgctttttgaagtgctgatcattttgacattggggtcggcggcaggcgacgtcgcgttttatgatgacgttccgatgctccctgttctggtggtattcatcaccctggcgctgctctatcgcctggttatgtggctgatggcgcatagtgaaaagttggaagatctgctggaaggcaagtcggtggtcattgttgaagacggcgaactggcgtgggaaaaactgcagcgctcgaacatgacggagtttgagttttttatggagcttcgcttgaatggcgttgagcaactggggcaggtcagactggccatcctggagacaaacggacaaatcagcgtctatttctttgaaaataaagacgttaagccggggttaagcattcttcctgagcactgtacgccacgctttatcgtggcgccggaggctggcgactatgcctgcgtacgttgcagtgaagtgatacgcatgaacgccggggaaaagcaattatgtccgcgctgcgcaaatccagaatggacgaaggcaagccgggctaaacgcgttgtttaacagcgaaaatatcggatttatacggttaatccggaagattctgttgtgtgacgcatgccgcattttctcctcgcattgttttacccattgcggcgcgtgtcactgaatgataaaaccgatattcacatgaataacgtttgcctgatgtctgtcaggcaggaaacaatgcagcgtggtgaggggaaatggctcaggtctttaattttagttcaggtccggcgatgctaccggcggaagtacttaaactggcgcaacaggaactgtgtgactggcacggtcttggtacgtcggtaatggaaattagccatcgaggcaaagagtttatccaggtcgctgaagaggcggagcaggattttcgcgatctccttaatatcccctccaactataaagttttattttgtcacggcggcggtcgcgggcagtttgctggcgtgccgctcaatctgctgggcgataaaaccacggcggattatgtcgatgccggttactgggcggcgagcgccatcaaagaagccaaaaaatactgtgcgccgcagattatcgacgccaaaatcaccgtggacggcaaacgtgccgtaaaaccgatgcgcgagtggcagctttccgataatgccgcttatttgcactattgcccgaatgagaccattgacggcatcgccatcgatgaaacgccggattttggcccggaggtggtcgtcacggcggacttttcttctaccatcctgtctgcgccgctggacgtctctcgctatggcgtaatttatgctggcgcgcagaagaatatcggtccggcaggactgacgctggttatcgtccgggaggatctgttaggcaaggcgcatgagagctgcccgtccatcctcgactacaccgtcctgaatgataacgactcgatgtttaatacgccgccgactttcgcctggtatctttccggtctggtgttcaaatggttgaaagcgcagggcggcgtggcggcgatgcacaaaatcaatcagcaaaaagcggagttgctgtacggtgtgattgataacagcgatttctaccgtaacgatgtcgcacaggccaaccgttcgcggatgaatgttccgttccagttagcggacaatacgctggacaaggtctttctggaagagtctttcgccgccggtctgcacgccttaaaagggcaccgtgttgttggcggtatgcgcgcctctatctataacgccatgccgattgaaggggtaaaagcgctgaccgatttcatgatcgattttgagcgtcgccacggctaatacgtttcttttttcatccccacggccagtctgtggggtttttatttctgttttttgagagttgagtttcatggaatccctgacgttacaacccatcgcgcgggtcgatggcgccattaatttacctggctccaaaagtgtttcaaaccgtgctttgctcctggcggctttagcttgtggtaaaaccgctctgacgaatctgctggatagcgatgacgtccgccatatgctcaatgccctgagcgcgttggggatcaattacaccctttctgccgatcgcacccgctgtgatatcacgggtaatggcggcgcattacgtgcgccaggcgctctggaactgtttctcggtaatgccggaaccgcgatgcgtccgttagcggcagcgctatgtctggggcaaaatgagatagtgttaaccggcgaaccgcgtatgaaagagcgtccgataggccatctggtcgattcgctgcgtcagggcggggcgaatattgattacctggagcaggaaaactatccgcccctgcgtctgcgcggcggttttaccggcggcgacattgaggttgatggtagcgtttccagccagttcctgaccgctctgctgatgacggcgccgctggcccctaaagacacaattattcgcgttaaaggcgaactggtatcaaaaccttacatcgatatcacgctaaatttaatgaaaacctttggcgtggagatagcgaaccaccactaccaacaatttgtcgtgaagggaggtcaacagtatcactctccaggtcgctatctggtcgagggcgatgcctcgtcagcgtcctattttctcgccgctggggcgataaaaggcggcacggtaaaagtgaccggaattggccgcaaaagtatgcagggcgatattcgttttgccgatgtgctggagaaaatgggcgcgaccattacctggggcgatgattttattgcctgcacgcgcggtgaattgcacgccatagatatggatatgaaccatattccggatgcggcgatgacgattgccaccacggcgctgtttgcgaaaggaaccacgacgttgcgcaatatttataactggcgagtgaaagaaaccgatcgcctgttcgcgatggcgaccgagctacgtaaagtgggcgctgaagtcgaagaagggcacgactatattcgtatcacgccgccggcgaagctccaacacgcggatattggcacgtacaacgaccaccgtatggcgatgtgcttctcactggtcgcactgtccgatacgccagttacgatcctggaccctaaatgtaccgcaaaaacgttccctgattatttcgaacaactggcgcgaatgagtacgcctgcctaagtcttctgttgcgccagtcgacgggctggcgcgccgagtccgtattcgcactatttttataattatgactaatgctaatttgttgatgatttaacacattgatttatgtgttttttataatagttatcaacggaagattagtatgaaaaataaatcattactactggcggtggcgatttccgccacgctactggcaggatgtaaaaatggcgtgaatggcaatttaatcgccagttcaggcatgtcaacctacaaagccgccacactgtccgatgcggatgttaaggcattatctaataatgcctgtaaacaaatggacagcgagaatcaactggcaggttcgaaaagcaaatacaccaaacgtctgagcaaaatcgccaaagcgctgggtaacaacattgacggtacgccggttagctataaagtctatatgaccagcgatatcaacgcatgggcgatggcgaacggttgcgttcgcgtatactccggcctgatggatctgatgaccgataatgaaattgaaggcgtactgggccatgaactgggccatgtctctttagggcactctcgcaaggcaatgcagaccgcttatgccacgctggcggctcgcgatgcgatttccgccaccagcggcgtcgcagcgcagctttcccagtctcaattgggcgatctggcggaaggcgtcatcaattcggcgttttctcgcagtcaggagtcggatgcggatgacttctcttacgatctgctgaaaaaacgcgggattaacacccagggcttagtcacggcattcgataaattcgccacaatggacgcaggtcatgcaaaatcattgatggactcccacccggcttcagccgatcgcgcgcagcatatgcgcgacagaattgccgaagataaaaagtaaatcattgtcatctttcgggctggtttctcgccggcccgctataattgcgcaattattccgcatctgattacagacaaaactggtttttgcacgcaacgttaacggtcgcgagcgttggcgcgtataatgcgcggcgtttacgttaacggtacgcctgtttaaggagataaagatgacggcaattgccccggtaataaccattgatggcccaagcggtgcaggtaaaggcaccttgtgcaaagcaatggcggaagcattgcaatggcatctgctggattccggcgcgatataccgcgtactggcgctggcggcattgcatcaccatgtcgatctcgcctctgaagatgcgctggtgccgctggcgtcccatctggacgtgcgtttcgtctcaacggacggcaacctggaagttatcctggaaggcgaggacgttagcggcgaaatccgtacgcaggaagtcgcgaacgcggcatcccaggtggcggcattcccacgcgtgcgtgaagcgcttcttcgccgccaacgcgcattccgcgaagcgcctggtttaatcgccgatggacgcgatatggggaccgtggtcttcccggatgcgccggtaaaaattttccttgacgcctcctcggaggaacgtgcgcatcgacgtatgctacagttgcaggagaatggctttagtgttaactttgaacgccttttggccgagatcaaggaacgcgacgatcgcgatcgtcatcgtgccgttgcgccgttagttcctgctgctgatgcattagttttggattctacccgattaagcattgagcaagtgattgaaaaagcgttacaatatgcgcgccaaaaattggctctcgcttaaatgcgaccgaatttgtagtacccccgttgcaaaggattgacagcgggtatgttaaacaaccccatccggcacggagccaggtggacgttaaatatgaaacctgaagattaaacatgactgaatcttttgctcaactctttgaagaatccttaaaagaaatcgaaacccgcccgggttccatcgttcgtggtgttgttgttgctatcgacaaagacgtagtactggttgacgccggtctgaaatctgagtctgccattccggctgagcagttcaaaaacgcccagggcgaactggaaatccaggttggtgacgaagttgacgttgctctggatgcagtagaagacggcttcggtgaaactctgctctctcgtgagaaagctaaacgtcacgaagcatggatcacgctggaaaaagcttacgaagatgctgaaactgttaccggtgttatcaacggcaaagttaagggtggcttcactgttgagctgaacggtattcgcgcgttcctgccaggttctctggtagacgttcgtccggtgcgtgatactctgcacctggaaggcaaagagcttgaattcaaagtaatcaagctggaccagaaacgtaacaacgttgtggtttctcgtcgtgccgttatcgaatccgaaaacagcgcagaacgcgatcagctgctggaaaacctgcaggaaggcatggaagttaaaggtatcgttaagaacctcactgactacggtgcattcgttgatctgggcggcgttgacggcctgctgcacatcactgatatggcctggaaacgcgttaagcatccgagcgaaatcgtgaacgttggcgacgaaatcaatgtgaaagtgctgaaattcgaccgcgagcgtacccgtgtatccctgggcctgaaacagctgggcgaagatccgtgggttgctatcgctaaacgttatccggaaggtaccaaactgaccggtcgcgtgaccaacctgaccgattacggctgcttcgttgaaatcgaagaaggcgttgaaggcctggttcacgtttccgaaatggactggaccaacaaaaacatccacccgtccaaagtggttaacgttggcgacgtagtggaagtgatggttctggatatcgacgaagaacgtcgtcgtatctccctgggtctgaagcagtgcaaatctaacccgtggcagcagttcgcagaaacccacaacaagggcgaccgcgttgaaggtaaaatcaagtctatcactgacttcggtatcttcatcggcctggacggcggcatcgacggcctggttcacctgtctgacatctcctggaacgttgcaggcgaagaagcagttcgtgaatacaaaaaaggcgacgaaatcgctgcagttgttctgcaggttgacgcagaacgtgaacgtatctccctgggcgttaaacagctcgcagaagatccgttcaacaactgggttgctctgaacaagaaaggcgctatcgtaaccggtaaagtcactgcagttgacgctaaaggcgcaaccgtagaactggccgacggcgttgaaggttacctgcgtgcttctgaagcatcccgtgaccgcgttgaagatgcgactctggttctgagcgttggcgacgacgttgaagctaaattcaccggcgttgatcgtaaaaaccgcgcaatcagcctgtctgttcgtgcgaaagacgaagctgacgagaaagatgccatcgcaactgttaacaaacaggaagatgcaaacttctctaacaacgcaatggctgaagcattcaaagcagctaaaggcgagtaatcctctgaaacttcgggtcttttagtccgaagtataacgagattacttgacagattgcaggtttcggcctgtaatcaagcactaagggcggctacggccgcccttaatcaatctcacggctgcagccaatttgcctttaaggaaccggaggaatcatgaccaagtcagaattgattgaaagacttgcaacccagcaatctcacattcccgctaaggcggttgaagacgcggtaaaagagatgctggagcatatggcctcgactcttgcgcagggcgagcgtattgaaatccgcggtttcggcagtttttctttgcattaccgcgcgcctcgtaccggacgtaaccccaagaccggcgataaagtggaactggaaggaaaatacgttcctcactttaaaccgggtaaagaactgcgcgatcgcgccaatatttacggttaagttttaacgcaaaacttgaacccgaaaaaagcaccgtcagggtgcttttttcatttatacgccgtcaggcgcaaacgctattcgaccgaaaactggaaaacgtttcgcattttttgctgcgtcttacatttatcaggtaaaaaacctggaatccgcgccgtatagcacaaaatcccctccagacaatggcgtcctgaacctgcacactttcccgcacagggaggtgtctatgaagataacgacggtcagcgtatgcgtagtatgcggcatacttccactcatgatattgccagtattacctgatacgtggattctcgcggtgctgttttgtctggcatgtttgctttgcctcataccccatcactatgcgcgctacgcggcattaactttgctctttttcatgtgggggatatttgccgccaggcaggccatctgggcgggaaacgtcctgcccgccgcgacgcaggaggcgacagtcgtcattactgccaccgatcatatgaccactcattatgggcgaatcacccatttgcgcggaaagccgctctttcctgctgtagggattgtcctgcatggccagtacttacccacggaagtgtgtgccgggcaacagtgggcgatgacgctgaaggtcagagcggtacacggacagcttaacgaaggcggttttgatagccagcgttacgcgctagcgcagcaccaaccgttgaccgggcgtttcctacaggctaaagcgattaaccctgagtgtagcttgcgtgggcgctatcttgcttcgcttcgcgctacgcttgcgccttatccgtggcagcaggttattctggcgttgggaatgggggagcggggagcggtgtcgcaggaggtgaaggccgttatgcgcgatacggggactgcccatttgatggcgatttccggcctgcatatcgcttttgctgcgttattggctgccggattaatccgtggcggacaattctttttgccggtcagatggattcgttggcagacgccattgctgggcggcattctttgcgcgatatgttatgcctggcttaccggcttacaaccgcctgcgctgcgcacggtggcggcgctgagcgtctggggaggattaaaattaagcggacgacagtggagcggctggcaagtctggtgctgctgtctggccgcgattattttcgccgatcctgtggcggttatatcacaaagtctttggctgtcagcatttgcggttgccggcctgttattctggtatcagtggtttcctgcgccaaacggaaattttccacgaggcttacgctggttgcttaacctgcttcacctacaggcaggcattacacttctgcttttgcctctccaggtggcgctttttcatggcataagcgttaccgcaatgctggcgaatctttttgccgtaccctgggtcacatttgtgacggttccactcatcctggcgggaatgattctgcatttaaccgggccgttttttcttgaagagtgggtatggtacctgaccgatcgcgcgttagccgcgctattttacctgttgaatgctttaccgcagggctgggtcaatattgataaccgttggcagtggctgacgcttttaccctggttaacgcttatcgcgtggcgattaaacgtctggcgtacctggccggcggtttgtttatgcgggttattgttgatgagctggccactctggcggccgataaacgccagcggatggcaggtgcatatgctggatgtcggtcaggggctggcgatagcgatcgtcaggggcgataaagtaatactctacgataccggtcgggcatggccggagggcgacagcgggcaacaggttattattccctggttgcgctggcataatctgacgccggagggcgttattttgagtcatgagcatctggatcatcggggcgggctgcgttcgctacagcaggtctggccgtcaatgtggattcgcagcccgttaggctggcagggacatttgccctgttttcgtggcgagcagtggcaatggcaggggctaacgtttcaggcgcactggccgttacgcgaaagtgccgatcgaggaaataaccgttcttgtgtggtcaaagtggatgacggtgtacatagcatcctgctcacgggcgatatcgaagcgggcgctgaacaaaaaatgctaagtcgttactggcgacatcttgcggcgacgtttatccaggtgccgcatcatggtagtaatacgtcgtcgtcgctaccatttattcagcgcgtacatggtgaagcggcgctggcgtccgcatcgcgctataacgcatggcggctgccgtcccgcaaggtaaaacagcgctaccgacagcaggcgtatcagtggtttgatacaccccaccaggggcaaatttcgctgcggttttctccgcagggctggcgcatacaaggcttacgggatcaaattttacctcgctggtatcatcagtggtttggcgtgtccgaggataacgggtagaatatgcggctatttcaacaaatgctggttttttgaatgcataacgataaagatctctctacgtggcagaccttccgccgactgtggccaaccatagcgccttttaaagcaggtctgatcgtggcgggcatagcgttaattctcaacgcagccagcgataccttcatgctatcgctcctcaagccattactggatgatggtttcggtaaaacggatcgctcagtgttgctgtggatgccgctggtggttattgggctgatgatattacgaggcatcactagctatatctccagctactgtatttcatgggtgtcaggcaaggtggtaatgaccatgcgccgtcgcctgtttggccatatgatgggaatgcccgtcgccttctttgataaacagtctaccggtacgctgctgtcgcgtattacatacgattcagaacaggttgcctcttcttcatctggcgcgctgattaccgtggtgcgtgaaggggcatcgatcatcggattgtttatcatgatgttctattacagctggcagttgtcgatcatcctggttgttttagcgccgattgtgtcgattgcgattcgcgttgtctcaaagcggttccgcagcatcagtaaaaatatgcagaacacgatgggacaagtgactaccagcgctgaacaaatgctgaaaggacacaaagaggtactgatttttggcggtcaggaagtcgaaactaaacgctttgataaagtcagcaataagatgcgactgcaaggcatgaaaatggtctctgcctcgtcaatttccgatcctatcattcagctcattgcctcgctggcgctggcgtttgtcctctatgctgcgagcttcccaagcgtaatggatagcctgacggcagggaccatcaccgtggtgttctcctccatgatcgcgctgatgcgtccattaaaatcgctgacaaacgttaacgcgcagttccagcgtgggatggcggcttgtcaaacgttgtttgcgattctggatagcgaacaggagaaagatgaaggtaaacgtgtcattgaccgcgcgaccggcgatctcgaattccgcaatgtgacgtttacttacccgggccgtgaagtgccggcattgcgtaacatcaatttgaaaattcctgccgggaaaaccgtggcgctggtggggcgttccggatcgggtaaatcaactatcgccagtctgatcacccgtttctacgatattgatgaagggcacatcctgatggatggtcacgatctacgcgaatacactctggcctctctacgtaatcaggtggcgctggtttcgcaaaacgtgcatctgtttaacgacacggtcgccaataacattgcttatgcccggacggaagaatacagccgcgagcagattgaagaggcggcgcgcatggcctatgccatggactttatcaataagatggataatggcctggataccatcatcggcgaaaacggcgtactgctttccggcggtcagcgccagcgtatcgcgatcgcccgcgccttactgcgcgacagcccgattctgatccttgatgaagctacgtccgcgctggataccgaatctgaacgtgcgattcaggcagcgttggatgagctgcagaaaaaccgtacctctctggtgattgcgcaccgtctctccaccatcgaacaggcggatgagatcgttgtagtcgaagacggtattatcgttgagcgcggcactcatagcgagctgctggcgcaacacggcgtttacgcccagctacataagatgcaatttggccaatgattgcgcgtatctggtcgggtgaatccccgctatggcggttactgctgccgctctcctggctgtatggcctggtgagcggggcgattcgtctgagctataagcttggttttaaacgcgcctggcgagcgccggtaccggtggttgtggtagggaatcttacggctggcggtaacggtaaaacccccgtagtcatttggctggtggaaaagctgcaacagcgtggcgtgcgcgtgggggtcgtttcccgcggctacggcgggaaagctgccgcttatccgctgctcctgacgccggagacgacaaccgcagaagcgggagatgaaccggtattgatttatcaacggaccggcgcgcctgtcgcggtagcgcctgaacgcgccgcggcggtgaaagcgattctggcagcgcataatgtgcagattattatcaccgacgatgggttgcagcattaccgactcgcgcgagatattgaaattgtggtgattgacggcgtgcgccgttttggcaacggctggtggcttcctgccggtcctatgcgcgaacgcgccagtcgcctgaaaaccgtagacgccgctatcgtgaatggcggcgtcgcccgggcgggcgaaatccccatgcagctagcgcctggactggcggtgaacttacgtacgggagcgcgttgcgatgtggcgcaactgagcaatattgtggcgatggcgggcatcggtcatccgccgcgctttttcgccacgctggaagcctgtggcgcgcatccgcaaaagtgcgtcccgctggccgatcatcaaacgctcgcccctgctgacgttcaggcgttggtcggtgaagggcagaccctggtaatgacggaaaaagacgcggtgaaatgccgtgcttttgccgaagataactggtggttcttaccggttgatgcgcgtttgtccggtgagcagcctgataagttgcttcaacatatcacctcgctggttcgctagcgtcccccaatgcagcggcagtgatgaatttatggagtcatgaatgtcattgccgtacctttctctttcccaggcccgttgtcttcaccttgctgcgcaggggctattgaaaaagccgcgccgtaacgcgctgcctggcgatgttcttgccgccatctcacgcatggcgttgctgcaaattgataccatcaatgttgtcgcacgtagcccctatctggtgctgtttagccgtctcggctcgtacccgcaggcctggctggatgaggcgctgcgacgcggcgagttaatggaatactgggcgcatgaggcctgtttcttaccacgccgtgactttaaacttatccgccatcgtatgctgtcgccggaaaagatgggctggaaatatcacgcggcatggatgcatgagcacgcggaagaaatagaacagctggtgcggcatattcaggagcacggtccggtgcgttctgccgattttgaacatgcgcagaaaggtgccagcggctggtgggaatggaaaccacataaacgccaccttgagggtttatttaccgccggaaaagtcatggttgttgagcggcgtaattttcaacgtgtatatgatttaacgccccgtgtgatgccgcactgggatgatgaacgcgatggactgtcacagtcgcaggcggaaaacctgatgctggataatagcgcgcgcagtctggggattttccgtgaacagtggctggcggattactaccgcctgaaacgtcctgacctgaagggatggcgggagagccgggcggaacagcagcagattattccggtcgaggtggaaacgttggggcggatgtggcttcatgccgatcttctttcgcagctggaaccggcgctgaataacgccttaaaggcgacccatagcgcagtactgtcgcctttcgatcctgtggtatgggatcgcaagcgggcaacgcagcttttcggatttaactatcggctggaatgttatacgcctgcggcgaagcgccagtacggttattttgtgctgccgctattatacctgggccgtttagtcgggcgaatggatgccaaaatgcaccgtaaaacgggggtgcttgaggttatctcgctgtatctggaggacgatattcgccctggcgttagtctgcaaaaaggaatctggcaggcgattagcgcgtttgctgcctggcaacgggcatcgcgcgtgacgctgggacaatgtccgccaggcctgtttagcaccatgcgtcatggctgggaaatagaccctgcaccctaaccgattatgttaatattgaaggattcacaatccggtccatctggaggaactatggatcatcgtctgcttgaaatcatcgcctgcccggtatgtaacggcaaactctggtataaccaggaacagcaagaattaatttgcaaactggacaatctcgctttcccgttacgcgacggcattcctgtattgctggaaaatgaagctcgcgccctgacatctgatgagagtaaatcatgagtttcgtcgtcatcattccggcccgtttttcatctacccgactgccaggcaaaccattagtggatattaatggtaagcccatgattgttcatgtcctggagcgggcgcgcgaatctggcgcggaacgcattattgtcgcgaccgatcatgaagacgtggctcgtgcggtagaagcggctggcggcgaagtgtgcatgacgcgcgccgatcaccagtccggcaccgaacggttggcggaagtggtagagaagtgcggattcagcgacgataccgttattgtgaacgttcagggcgatgagccgatgatcccggcggttattattcgccaggtcgcggaaaatctggcgcagcgccaggttggcatggcgacgctggcggtgccgattcacagcgccgaagaagcgtttaacccgaatgcggtaaaagtcgtgctggatgctgaaggctatgcgctttacttttcccgggcgacgattccctgggatcgcgatcgctttgcaaaaagtctggaaacggtaggggatacttgccttcgtcacctgggcatttatggctatcgcgcggggtttatccgccgttacgtgagctggcaacccagcccgctggaacatattgaaatgctggagcaactccgtgtgctgtggtacggcgaaaaaattcatgtcgccgtcgccaaagcggtgcccggcacgggcgtagacaccgccgacgacctggagcgcgtgcgcgctgaaatgcgttaacatgatcctgttcatgatcgtcttagacggtcatgaacagcgcggtatgatagcgcaaagatgaatactcacgtctgctcatcagtggcggctttctcgtaccgttacgattttcctcatttttcttttcttcccttgatctgatacgggtgacatctgtccatacgacgctcattattaaagcagtagcactaatgggggtaatctggaatggaacagttgcgggccgaactcagtcatttgttgggtgaaaaacttagccgtatagagtgcgtgaatgagaaagcggattccgcattgtggtcattatatgacagccagggcattccgatgccgctgatggcgcgaagttttaccactcccggcgttgcgcagcaactggcatggaaaacctcaatgctggcgcgtagcggtacggtgaggatgccggtaatctatggcgtattgacgcatgaagagcatcctggtccggatgtgctgctgctggaacggctgcgcggtgtgccggtcgaggcgccggcgcgcactccggaacgctgggaacagctaaaagatcagattgtcgaagggctgttagcctggcatcggcaggatagccgcggttgcgttggcgccgtagaccatactcaggagaatatctggccttcctggtatcgtcagcgggtggaggtgctgtggacgacgctaaatcagttcagcaataccggcctgacgatgcaggacagacgcattctgtttcgtaccagagaatgtcttccttcgttatttgaagggtttaacgataactgcgtactggtgcatggcaacttctgcctgcgcagtatgcttaaagacgcccgtagcgatcagcttctggcgatggtcggccccgggctgatgctgtgggcgccgagagagttcgaactgtttcgcctgatggataatccattggcggagggattgctttggcattatctgcaacgcgcgccagtggcggagtccttcatctggcggcgttggctctatgtgctgtgggacgaggttgcgcaattggtcaataccggacgttttaaccgtaccaattttgatcttgcggcgaaatcattactcccctggcttgcctgatatgcctttcagccattgccaaagtcgccctaatgtttcatacccagcgcgatcgctgtgcatcagccagaccggggacggaattgcccgctcccagggattgagcggcgaatcgatcgccaactgattcgccggcgcgggaagcggattcagcccggcatgctgaaagaaaatcatcgcacgcggcaaatgcgaggcggaggttaccaacaggaaaggggcgtcgccgatggcctgcttaacggcggcggcttcttcttccgtatcttttggcttatccagcgtaataatatcgctacgcggtacgcccagtgactgcgccacccgcgcaccgacttccgccgtgcttaccgtattggtttttgctacgccgccggtaaaaatcagcctggctcccggattcgcgcgccacagccgaatgccttccgccagccgcggcaagctgttgttaattaaattagagctcggcgcccactgcgggttccaagtatagccgccgccgagaaccacaatatattccaccttttgcggaccctgccaggtagggtagcggttttctatcggacgcagcagatggtcagagacgggttgcaggcttaatagcaatagcgccagccaacctacgctgataaatacttttccggtcttctgaaagcggctaaaccagagcagcgccaggccgacgccaatcatcagcaacatcagcggaagcggcaataacataccgccaatcactttctttagcgtaaaaagcatcctttttggttccttttttaaccatatagcggaggattaacggtgatattacaccagacaggttcattctggccgcggctgtgacaaaatagcggttttatcagataacgcctgagccagcctgtggagagtccgatgcaggatcgcaattttgatgacattgctgaaaagttttcccgtaacatttacggcacgaccaaaggacaactgcggcaagccattctgtggcaagacctggatcgcgtgctggaggagattggcgggcggaaactgcgggtgctggatgccggcggcggcgaagggcaaacggcgattaagatggcggaacgcggccatcaggtgacgttatgcgatctgtctggcgaaatgatcgcccgcgcgcggcaggcggccgaggcaaaaggtgtgagcaaagacatgcattttatacaatgcccggctcaggacgtcgcttcgcatttggaaagcccggttgatctgatattgtttcatgctgtgctggagtgggtagccgatcctgtcggcgtattagaaacgctctggtcagtattgcgccctggcggcgcgctgtcgttgatgttctataacgctaacggtttgctgatgcacaatatggtggcgggtaattttgactacgtgcaggcggggatgcctaaacgcaagaagcgcacgctgtcgcctgactacccgcgcgaccccgcgcaggtgtaccagtggctggaggcgattggctggcagattaccggtaaaaccggcgtgcgtgtgtttcatgattatctgcgtgaaaaacaccagcagcgtgactgttatgagaccctggtcgaactggaaacgcgttattgccgccaggagccgtatattagccttgggcgctacattcatgtcaccgcgattaaaagcccggcgctagccgcagatgcaaggataacctatgagtgaattttcccagacagtccccgaactggttgcctgggccagaaaaaacgacttttccatctcgctgccggtagacagactttcctttctgctggcggtcgccacgttgaacggcgaacgccttgacggcgagatgagtgaaggcgagctggtggatgcattccgccatgtgagtgatgcgtttgagcaaaccagcgaaaccatcggcgtgcgcgctaataacgcgattaacgatatggtgcgtcaacgtctgctgaaccgctttaccagcgagcaggctgaaggcaatgcgatttaccgattaaccccgctcgggattggcatcaccgattactacattcgtcaacgcgaattctctacgctgcgtctttctatgcagttgtcgattgtggccggcgaattgaagcgcgcggcggatgcggcagcggaggggggcgatgagttccactggcatcgcaatgtttacgcgccattgaaatattcggtggcggagattttcgacagtatcgatctcacccagcgcatcatggatgaacagcagcagcaggtgaaagacgatatcgcacaactgctgaataaagactggcgggcggcgatttccagctgtgaactgctgctttccgaaacgtccggtacgctgcgcgagttgcaggatacgctggaggcggcgggcgataagctgcaggctaacctgctgcgcattcaggatgccacgatgacgcacgacgatctgcattttgtcgacaggctggtgtttgacttacaaagtaaactcgaccgcattatcagttggggtcagcagtctattgatttatggatcggctacgatcgtcacgtgcataaatttatccgtaccgcgatcgatatggataaaaaccgtgtcttcgcccagcggttgcgccagtccgtgcagacttattttgacgatccctgggcgctaacctatgcgaatgccgatcgtctgctggatatgcgcgatgaagagatggcgttgcgtgacgatgaagtcaccggggagttgccgccggatctggaatatgaagagtttaacgagatccgcgagcagttagcggccatcattgaagaacagctggctatctacaaaaccagacaaacgccactggatcttgggctggtggtgcgcgagtatctggcgcaatacccgcgcgcgcgtcatttcgacgtggcgcgtattgttatcgatcaagcggtacgtcttggcgtagcgcaagcagatttcaccggactgccagccaaatggcagccgattaatgattacggagccaaggtacaggcgcatgtcattgacaaatattgaacaagtgatgccggttaagctggcgcaggcgctggcgaatccgttatttccggcgctggatagcgcattacgttcgggccgccacatcgggctggacgaactggataatcatgcctttctgatggattttcaggaatacctggaagagttttacgcgcgttataacgtggagttgattcgcgcgccggaggggttcttctacctgcgtccgcgttctaccacgcttattccgcgctcggtgttatccgaactggatatgatggtcggtaaaattctctgctacctctatcttagcccggagcgtctggccaacgaagggatctttactcagcaggagttgtacgacgagctgcttacccttgcggacgaagccaaactgctaaagctggtgaataaccgctcgacgggatctgacgttgatcgtcagaaactgcaggaaaaggtgcgttcttctttaaaccgcctgcgtcgtttgggcatggtatggtttatgggccacgacagcagcaaattccgcattaccgaatcggtcttccgctttggcgcggatgtccgtgccggcgacgatcctcgcgaggcgcagcgtcgtctcatccgcgacggggaagcgatgcccattgaaaaccatctgcaacttaatgatgagaccgaagagagtcagccggacagtggagaggaagaataatgattgaacgcggtaaatttcgctcgctaacgctgattaactggaacggtttttttgcccgcacttttgacctggatgaactggtcacgacgttatccgggggcaacggcgccgggaaatccacgacgatggcggcgttcgtcacggcgctgatcccggatctcacattactgcactttcgtaacaccacggaagccggcgccaccagcggttcgcgcgataaaggtctgcacggtaagctgaaggcgggtgtctgttactccatgctcgacaccattaattcccgccatcagcgggtggtggtcggcgtgcgtctgcagcaggtcgctgggcgcgatcgcaaagtggacatcaaaccgttcgctattcaggggctgccgatgtcggtacagccgacacaactggtgacggagacattaaacgaacgtcaggcgcgcgtactgtcgcttgctgagctgaaagacaagcttgacgagatggaaggcgtgcagtttaagcagtttaactccatcaccgattatcattcgctgatgtttgacttagggattatcgcccgtcgtctgcgctccgcttccgatcgtagtaaattctatcgcttgatagaggcctcgctgtacggcgggatctccagcgccattacccggtcgctacgcgattatttattgccggaaaacagcggcgtgcgcaaggcgttccaggatatggaagcggcgctgcgcgagaaccgactcacgctggaagcgattcgtgttacccaatccgatcgcgatttgtttaagcatttgatcagcgaagccaccgattatgtggcggcggattatatgcgccacgccaatgagcgtcgggttcaccttgatcaggcgttggcgtttcgacgcgatctgtacacatcgcgcaaacagctggcggcggagcagtacaagcacgtcgatatggcccgtgagttgggcgaacataacggcgccgaaggttctcttgaggcggattaccaggcggcgagcgatcacctgaatctggtacaaaccgcgctgcgccagcaggaaaaaattgaacgctacgaagcggatcttgaagagctgcagattcgactcgaagagcaaaacgaagtggtggcggaagccgccgaaatgcaggacgaaaatgaagcgcgtgccgaagccgccgagctggaagtcgatgaactcaaaagccagcttgcggattaccagcaggcgctggatgtacagcaaacgcgcgcgattcagtataaccaggcgatatcagcgctcgcccgcgctaaagaactttgccatctgccggatctaacgccggaaagcgccgccgaatggctggatactttccaggcaaaagagcaggaagctacggaaaaactgctgtcgttggaacaaaaaatgagcgtggcgcaaaccgcgcacagtcagtttgagcaggcttatcagctggtagcggcgatcaacggcccgctggcgcgtagcgaagcctgggacgtggcgcgcgagctgttacgggacggcgtgaaccagcgtcatctggcggaacaggtacagccgttgcggatgcgcctgagcgaactggaacagcgactgcgcgagcagcaagaggcggaacgtctgctggcggagttctgtaagcgacagggcaaaaattttgatattgacgaactggaagcgttgcatcaggagctggaagcccgcatcgcgtccttgtctgagagcgtgtcgtcagccagcgaacagcgtatggccttgcgtcaggaacaggaacagctgcaatcccgtatccagcatctgatgcaacgcgctcctgtctggctggcggcgcagaatagcctgaaccagcttagcgaacagtgcggcgaggagtttacgtccagccaggaagtgaccgaatacctgcaacagctactggagcgtgagcgcgaagccattgtcgaacgcgacgaagtgggcgcgcgtaaaaatgcggttgatgaagagatcgaacgtttaagccagccgggcggcgcggaagaccagcgtttgaatgcgctggcggagcgttttggcggggtactgctgtcggaaatctacgatgatgtcagccttgaagatgcgccgtacttttccgcactgtatggtccgtcgcgccatgcgatcgtcgtaccggatttatcgcaaatagccgaacagcttgaaggtctgaccgactgcccggaagatctgtacctgatcgaaggcgatccgcagtcttttgatgacagcgtattcagcgttgacgagctggaaaaggcggtggtcgtgaaaattgccgaccgtcagtggcgttattcgcgttttccgtcgctgcctatttttggccgtgcggcgcgcgagaaccgtattgaaagtctccatgcggaacgggaagtgctttccgagcgctttgccacgctctcgtttgacgtgcagaaaacccagcgtttgcaccaggcgttcagccgttttatcggtagccacctttctgttgcctttgaggacgatccggaagcggaaattcgccgactgaacgggcgtcgcgtcgagctggagcgcgcgctggcgacgcatgaaagcgacaaccagcagcagcgccttcagtttgagcaggccaaagagggcgtttccgcgcttaaccgtttgctgccgcggctgaatttattggccgatgaaacgctggccgatcgggtcgatgaaattcaggagcggttggatgaggcgcaggaagcggcgcgatttgtgcagcaatatggaaaccagttagccaaactggagccagtagtttccgttctgcaaagcgatccggaacagtttgagcaattaaaagaagactatgcatggtcgcagcaaatgcagcgcgacgcgcgccagcaggcttttgctctggctgaagttgtcgaacgtcgggcgcatttcagctattccgactcggcggaaatgctgagcggcaacagcgatctcaacgaaaagctgcgccagcggctggagcaggcggaagccgagcgtacccgcgcccgcgaagcgctgcgcagccatgccgcgcagttaagtcagtacagccaggttctggcctcgctaaaaagctcttacgacacgaaaaaagagctgcttaacgatttgcagcgcgaattacaggatattggcgttcgcgccgacagcggggcggaagagcgcgcccgccagcgtcgcgatgaactgcacgcccagttgagcaataaccgttcgcgtcgcaatcagcttgagaaagcgctcaccttctgcgaagcggagatggagaacctgacccgtaagctgcgcaagctggagcgcgattatcatgaaatgcgcgagcaggttgtgaccgcgaaagccggctggtgcgcagtcatgcggatggtgaaagacaatggcgtggaacgccgtctgcaccgtcgtgagctggcttatctgtcggcggatgaactgcgctccatgtcggataaggcgttgggcgcgctgcgcctggccgtcgcggataacgaacatctgcgcgacgtattgcgtctgtcggaagatccgaaacgcccggaacgtaaaatccagttctttgtggccgtttaccagcatctgcgcgaacgtattcgtcaggatattattcgtaccgacgatccggttgaagccattgaacaaatggagattgaactgagccgtctgacggaagagctgacatcgcgtgagcaaaagctggcgatcagttcccgcagcgtggcaaacatcatccgcaagactatccagcgtgaacagaaccgtatccgtatgctgaaccaggggttgcaaagcgtctcttttggccaggtgaatagcgtgcggttaaacgtcaacgtgcgtgaaacgcatgccaccttgctggatgtgctttcagaacagcaggagcagcaccaggatctgtttaacagcaatcgtctgaccttctccgaagcgctggcgaaactgtaccagcgtctgaatccgcagatcgatatggggcaacgcacgccgcagaccatcggcgaggagctgctggactaccgtaactatctggaaatggaagttgaagttaaccgtgggtccgacggctggctgcgtgcggaatccggcgcgctatcaacgggggaagctatcgggaccgggatgtcaattctggtgatggtggtgcaaagctgggaagacgaagcgcgcagactgcgcgggaaagatatttcgccatgtcgcctgctgttcctcgatgaagcggcgcgtctggatgcgcgctctatcgccacgctgtttgaactatgcgaacgtttgcagatgcagctcatcatcgctgcgccggaaaacatcagtccggagaagggcacgacgtataaactggtgcgtaaagtgtttcagaatactgagcatgttcatgttgtcgggctgcgtggctttgcgccgcagcttccggaaacgcttcccggtacgcagacggaagatacgccttcagaagcgagttaaatacggcagaaacgatgacgtgcctgatggcgcctcgtttatcaggcaaggccggataagtcggttacgccgccatccggcacaacaagttctgttttatcattagcctggggcggcgaaagccgcctttttctttatctgaaaaatctctccgggtagtgcattttctttaaacttctttacattaggttaggcaaaaacgtaacgaactttatatactggagttaagcctgacgagtgagcaggctgactcgtcatactaaacaaaagcattggttgcggttgacccgcgctgcgggcagcgcagtcatgcggagtatgataacgaaaacagggggcaagggatgttgcttaataagatgtgtggtcgttgtctgtcggcaatcagtttatgcctggccgtaacattcgctccactgttcaatgcgcaggccgatgagcctgaaatgatacctggcgatagcgccgttgccgcgacggatctggctgggccgcagaagcaatcagccgcgacggcgattatggccgggattcagccgctgccggagggcgtttcagccgagaaagtccgggctgatttacagtcgcagcttccttccggctatacgccggtctatatgagccagctgacattgctgtatgccgcgcgcgacatgaagcccatgtgggataatcgcgatgcggtgaaagccttccagcaacagttggcggaggtggcgattgccggattccagccgcagtttaccgcctgggtggcattgttgaccgatcccgccgtaaacggtatggcgcgcgatgttgtgttgtcagacgccatgatgggctatctccatttcattgcgaatatccccgtcaaaggccagcgctggttatatagcaacaaaccttacgcattggcgacgccgccagtctcggtgattaaccagtggcaaatcgcgctggaagagggccagttgccgatgtttgtcgccagcctggcgccgcagcacccacagtatgcgcccatgcatgatgcgctgctgaagctggtggcggactctcgcccgtggccgcagttgaccaataccgcgacgctgcgcccggggcaatggagtaacgatgtgcctgcgctgcgcgaaatattacagcgtacggggatgctggatggcggtccaaagatagccttacccggcgataacactgctgatagcgccgtcgtcagcccctccgccgtggtcgacgaaacatcggtggcgcacgacgaaccaacggcccgccgtagtaagccggctccggcggcacgcgcctacgatcgtgaactggtcgaggcggtaaagcgttttcaggcatggcaagggctgggggcggatggcgttattggcccggcgacgcgtaactggcttaatatgacccccgcgcaacgcgcaggcgtactggcactgaatatccaacgtttacgcctgctgccagcggaactctctaccggtattatggtaaacattcccgcttattcgctggtctactatcagaatggcaaccaggtgctggcttcaagggtgatcgtcgggcgtcccgatcgtaaaacgccgatgatgagcagcgcgctgaataatgtggtggtgaacccgccgtggaacgttccgcccacgcttgcgcgtaaagacattttaccgaaggtgtggaatgacccaggctatctggagcgccatggctacaccgtgatgcgcggctggaacagcaaagaagcgatcgatccgtggcaggttgactgggccaccattacgccatcgaatcttccgttccgtttccagcaggcgccaggcgcgcacaattcgctggggcgttataaatttaatatgccgagttcagatgcgatctatctgcacgatacgcctaaccatactctctttcagcgtgacgccagggcgttaagttccggctgcgtgcgggtcaataaggcctctgagctggcgaatatgctcttgcaggatgctggctggaacgatgcgcggatctcaggcgccctgaagcaaggcgacacgcggtatgtcaatatccggcagaacattccagtaaatctttactatctgaccgcatttgtcggcgcagatggacgtatgcaatatcgtacagatatttacaattacgatctcacagcgcgatccagcgcacaaattgtgccaaaggttgaacaattaatcaggtaaatgaagaagttctggtaaatatgttgtcctaatgtttggcttcaacggggcgtttcgctgtagacccccgttgtggctgggggagggccatcttgacgcgggctttatcggcagttaaggtgcctttcgtgcgccagaagtgcatatacaacaacctttaagtcgaccgggccgttcagaagtctgtgccagccggtatcatgtctgcttaaaggtagaagtgtattaacgataacattgacctgtagacctgattatcatggacaaatttgacgctaatcgccgcaagctgctggcgcttggtggtgtcgctctcggcgccgccatcctgcccgcgccagcgtttgccacactctcgaccccacgcccgcgcattttgacgttaaacaatctccataccggagagtcaatcaaggcggagtttttcgatggaagagcctacattcaggatgaattagcaaagttaaaccattttttccgtgactatcgcgcgaataaagtccgatcaatcgatccccgcctgtttgaccaactttaccgacttcaggggctgttagggacgcgtaaacctgtgcagctcatctcaggctaccgttctcttgataccaataatgaattacgcgcccgtagcagcggcgtagcgaaaaaaagctaccatacaaaagggcaggcgatggattttcatattgaaggcgtggcgctgagcaatattcgcaaagcggcgttatctatgcgcgcaggtggtgtaggatattacccacgtagtaactttgtgcatattgataccgggccggcgcggcactggtaatcagcgaggcttaatcaaaggagcagtatgaactatcgtattattccggtcaccgcgttctcccagaactgttcattaatctggtgcgaacaaacccggctggcggcgctggtcgatccgggcggcgacgcggaaaaaattaaacaggaagtggacgccagcggcgtgacgttgatgcaaattttactcacgcatgggcatctcgatcatgtcggcgcggcgagtgaactggcgcagcattacggcgttcctgttatcggtccggaaaaagaagatgagttctggctgcaaggactgccggcgcaaagtcgcatgtttggtctggatgagtgtcagccgctgacgcctgatcgctggctgaacgacggcgatcgcgtcagcgtagggaatgtgacgttacaggtgttacattgtccgggacacacgccgggacacgtggttttctttgatgaacagtcgcaactgctgatctccggcgatgtgattttcaaaggtggcgtcgggcgcagcgattttcctcgcggcgatcacacccagttgattgacgccattaagcgtaaattattgccgcttggcgatgatgtgacctttattcctggccacggcccgctctctacgctcgggtacgagcgtctgcataatcccttcttgcaagatgagatgccggtctggtaagcagaatgaaaaagcctgcacattgcaggcttttttatcggtcacgccagtcggcagctttttacagtaccgcgacaatggcttcgcacagcggcgccatattatccggggtcatgcccgccacgttcacgcgaccagaagccacggcataaacgccgaactcttcacgcagacgcagcacctgatctttggtcagaccgctgaatgagaacatcccgttctgcttgataataaagctgaagtcacggttcgcgcctttttcctgcaaggtattcacgaacagttgacgcatacgctgaatacgctggcgcatgtccgtcagttcctgttcccagatagcgcgcagggcgtcattactcaggatagtcgcgacgatggacgcgccgtgcgctggcgggttggagtagttagcgcgaatggcggatttcatctggctaaaagcgcgatccacggtttccgcatcggcggcaacgagggtgcaggcgccgacgcgctcattatataagccgaagtttttggagtaggagctggcgacaataagctctttatgcagcgcggcaaaggcgcgcagaccttccgcatcttcttccaggccgcgggcaaagccctggtaagcgaaatcgaatagcggcagccaccctttttcaacggaaagctcagccagaacctgccactgttccagagtagggtcaatgccggttgggttatgacagcaaccgtggaacagaaccacatcgccggcctgtgcttcgctcaggctggcttgtagcgcttcaaaatccagcgtgtgattttccgcatcgtagtaagcgtactcccgaacttccaggccggcagcgttaaacacgcttttgtggttcggccagctggggttgctcacccacacccgttttaccggagtattttttgccaaaaagtcggcggcaatgcgtaacgcgccggtaccgcccggcgtttgcgccgtgcgtgcgcgcttatcgttaatcagcgcgctgcctttgccgaacagcagttcctgagtgcagcgagcaaattccggaatcccgtcaatgccgagatagtttttcgtcgtttcattttccagtaaatactgctcggcttttttaacgctggtgagcaccggtgttttgccggtttcatctttatatacgccaatgccaaggttaattttccctggacggtcatcggcgcgaaacagatcggccaggcccaaaatcgggtcggcaggagcggcggttatgttctcaaacatgacgaggttccattatagttacagaagggaaatccgctatcaggttaacggcagatttacaaaatgccaaccgttagcgctaaaaagcccgcctgtttttgaaagacgcacattttctctaagagagataaaaaaacaggaccgaagtcctgtttttgaggcataaaacaaaggggtctgctgatcagaactggtaagtaataccgacagccgcctgatcgtcggtgccaacgtagctggagctgtagtcgttttcgtccagcaggttgaaacggtagtcaacccatacgttcatgtttttgttgaagtagtaagtcgcgcccgcctgaatatatttcgccagatcggccgagccgccggcgccgttcaactgcttacctttactctgcacatacgagattgccggacgcaggccgaagtcaaactggtactgagcgaccacttccaggttctgcgttttgtttgccatttccacggtatcggtaaccgtattttcaacaatgctcatattgcgggtttcagcatatacggcagccaggtagacgttgtttgcatcatatttcgcgccaacggcccacgattctgcgcgatcgccattaccatcgcgatcctgctgatcgttagtacgcttgctgttgctgtacgctgcggtgacgccaaagccgtcgaactcatatgccatggtgtaacctacgccatcgccattctgagagttaatgctgtggttgtcctgatttttaccctgatactggataccgaaagagagaccgtccaccagaccaaagaagtcagagttacggtaggtcaacaaaccgccagcacggctggtcatgtagttatcagtataggcgccgccccaggtttcgccggagaagtagggggccatatcggtataggattcaacatcataaacgataccgtagttacgaccataatcgattgaacccacttccgcgtatttcaaacccgcgaaagccagacggaccagattcgagttctgctgttcgccttcagcgcggtctgctttagtacggtattcccactgaccgaaaccggtcagatcggtgttaatctgcgtttcccctttaaaaccaatctgggcataagtctggtcggcatttttactatcgccggtcgttgtccatacgtgacgacccacggctttaccgtacagatccagcttattaccatctttattataaatttctgctgcgtttgcggttgcagcagccagcagggcagggatcaccgctgccaggattttgcgcttcatcattatttattaccctcattggtttttttatatgacacctgccactgccgtcaataaattccgtcaataaaactttacagaaatattgatgagagtttggtgtctttatgtgtctgacaggcatctttccattcaaactaacgtttcgctaccgtgaaagtgctacaaagataaagatttggtttcaaaaggaaataatatgtaaacaaatgttgtttttacggaactttgtgaacaacgtcaaacttcccctgagttatcgttttgatttgatcgtttttcttttatatccatgattttattgaatttatttgttcgcgacaccgttgtgcctgaaaaagcagctgacgagctatttcataaaaatagccatttagaagtctggatgtctgaaattgtggtgaaaaattgtgctattagagcagaaaaatctaatccgcaataaaattaagggttaatttttatgtgtaaatattttcgtgaaatatacagtaacaagatgtggtaattcagagggttgtaattaattttatttacttattgataataaaactgacattcaggcgaaaaaaaaggccagcatagctggccttgagtgtgacgtaaaaatcagaagctggcgttgcgtggggtccgtgggaacggaataacatcgcgcacgttttgcacaccagtgacgtaagcgataaggcgttcaaagcccaggccaaagccggaatgcggtacagtaccgtagcgacgcaagtcgcgataccaccagtaatcctctttattcagccccatttcggccatacgggcatccagcacatccagacgctcttcacgctgggaaccaccgatgatttcgccgattcccggcgccagcacatccatggccgccacggttttgccatcttcgttaaggcgcatgtaaaacgctttaatttctttcggatagtttttcaccactaccggcgctttgaaatgctcttccgccagataacgttcgtgttcggaagagaggtcgacgccccagaacaccgggttttcaaatgtcttaccacagcgttccagaatggcgaccgcatcggtgtaatccacctgagcgaagtcggtagagacaaaacgctccagacgagcgatagcgtctttatccacgcgttcggcaaagaacttcatgtcatccgcacgctcttccagaaccgcgttgaagacatatttcagcatggcttccgccagacgggcgttgtcttccagatcggcgaatgccacttccggctccagcatccagaactccgccaggtggcggctggtgttggaattttccgcgcggaaggtcggcccaaaagtatagattttggacagcgcgcaggcataggtttcaccgttgagctggccggagacggtcaggaatgattctttgccaaaaaagtctttgtcaaaatctactctgccctggtcgttacgcggcaggttttccagatccaacgttgagacgcggaacatttcgccagcgccttcggtatcggaagcggtaatcagcggggtagagacccaaaagaaaccctgctcatcgaagaagcgatgcagcgcctgcgccagagtatggcggacgcgcgctaccgcgccaatcaggttggtgcgcgggcgcagatgcgcgacttcacgcagatactcaatgctatggcgttttgccgccatcgggtaggtatccggatcttccacccagcctgcgacttctactttcgtggcctggatttcgaaactttgcccctgtcccggcgacgcgacaaccttacctgttactaccacggagcagcctgtcgtcaggtgtaatacttcttcattataattgggcagagaattattaatgacagcctgtacaggatcaaagcaggagccgtcataaacggcgaggaaggagatgccagcttttgaatctcggcgggtacgcacccatccgcgcacggtgacttcttggtcaacggctacgcggccctggagtacgtcggctacaggcacaacgctcataatattctctctagttaatagtcggaaaaaataaacacttgtccacccgaaatgggggtattcctatgttacctggcatctgcaatcagacaagcagaaatcgcatctggaagcaggttttcagaaagaaacctgtaaaaagttcgcacctgctcgcgaaccattgagaatttaggctggttttgcaagctttgcgcacgttactcgatcaggacgcgcatctcttgcttggcgttttgcatcacgacaatcgttttaaaagactttatattgcctgaggaaaagaaaagctcacgggtaagcgcttcatattccgccatgtcacgaacattgagcaccagtaaaaagtcgaaatcgcccgttacgtagtagacctgctgcacctgcgggcaactgacaaaccgttgacgagcctcttccagtaaattgaatcgctcgttttcgatcaccacctgcaccacaatcgtgaccgggcgtcccactttgccagcatcaataaggctgacattgcctttaattatgcccgcctcctccagtgccgcgatacgacgattcactgccgaaggtgaaagattgacctgttcggcgatttcccgctgagaaagacgattatcgcgctgcaataatgtcagaatgtttttatcccaggcgtcaagcttcatatcgcaaataacctctttaatgtgatgactatcactgtgcgcaattttgccgcgtccaggccgttaaaaaaaggtgaaaattgcacgacgatgggcattttcgcgccatttaacagcaataagcatagtactatcataatcagcggaataaagaaaaggacgtaatagatattgtgcgactcttttatcagtacgtttattaaagtgaggataaccactactacagccacaaaacgcgagttctttgcttgtttctactcaataattgacaaaaatatattatttcaataaataaactttaacaaaaggtatcattatgcatgagcttattaaatatcagtttaatacacgtcggaaaaaatatggtacaggagcggccttaagtttgcttaacggaaatgttgggcatgaggtgttagcatttcataaaaaattacccaattatgccgtcacgccgttacataatctggcgcatctaagccagcggcttggactagggtccatccatattaaagatgagtcctggcgttttggcctgaatgcttttaaaggtctgggcggctcttatgctgtaggaaaatatctcgctgataaattgcaatgtgatattaactcgttaagttttgctgcccttaatactcctgagattaaagaaaaaattaaagattgtgtttttgttaccgcgacggatggcaatcatggccgtggtgtggcgtgggcggcagagcaattaggtctaaaagccgtcgtttatatgcctaaaggatcatcgttaatccgggcagagaatattcgccatcatggagctgaatgcaccatcaccgatctgaactacgatgatgcagtgcgactggcccatagaatggcgcaaacaaaaggctgggtgcttttgcaggatacagcctggacagggtatgaagagatcccaacatggattatgcaaggctatatgacactagcggttgaagcttatgagcagctcgcagaaacaaacagtccgttgccaacccatcttattttacaagcgggggtgggatcgtttgctggcagtgttatgggttattttgttgaaaaaatgcaggaaaatatccctaatattattgtggttgagccgcatcaggccaactgtctttatcaatccgcagttatggatgatggtcaacctcactgcgtcactggcgatatggcgacgataatggccgggcttgcgtgtggggagccgaatattatcagttggcctattattcgggacaacaccagttgttttatttccgctgatgactgtctggcggctaagggtatgcgtatttctgccgcgccgcgtccaggtacggatacgccttttatttccggcgagtccggagctattggcgtagggttactttatgagttgatgaacaatatgcattatcaggatcttgctaatcgcttacagcttgatgccagtgctcatgttctgcttattagcaccgaaggcgatacgtccccagatatttatgaagatatagtctggaacggacgcagtgcttaaacattacgactaaaaaattagataataaaggtagcatgtaaaaatgcgttttttatacgcataataaacctaatgcaggaagcaagactttataacaatataccattaaaacggcatttagtgagtaagggatgctcctacccgctgactttccagtttagtgttgttggcaaaattcaggattacgctgaactggaaagattatttctgagactgaacgaattaatttaaatccgaggtcattatgttagagcaactttcacaactctttgaatttctatggggtggcccattatttttgtgtgtcatcggcattggtttttattttacagtacgcctcaattttttccagattattaatttaaaagacatttaccgtaatacaattggtacacttgccggaaaaaataaacaaaacactactggcgaggtagcgtctaaaaaatccttaaaatcaatagaggtggctgccactgtgctatccggctcattaggcgcgggaacgatcgcaggtgttgctgcggctattgcggttggcgggcctggagcaattttctggatgtggatcattgcggtcgtgggtatgatgaccaaaatggttgaagtgacgctggcggtgaaataccgaagtaaaggtgagaatggcgaatattatggcggcccaatgcattatattaagaaagggctcaataaaaaatggcatcccctggcaggattatatgcgtttgcattaatgattctggttattacggatgcctgttttgtgcaaactaatacgatggcggcggtcattcactatacgtttgacatcccaacaagcgtcatcggaggatttattgtcatcgtaggcgcgttggttattttaaaaggactctccagtcttggtaaattctgtacgattgcacttccaccgatcaccattgcctatttcattggtgccgctggtgtagtggtattgaatatcgaggctatcccacaggttataaaaagtattttctattatgcctttgcccctgcgccagcagccggtggctttgtcgggtcaaccatcatgatggccatcagtaaaggagccagtcgcggaatattcactaacgaagccggcatgggtacctcggccacagtacatgctactgccaacgtggattatgctttccgtcagggaatgtggggggcagtggaagtattttttgtctcaatgattacctgtaactttaccgcatttgctgtacttgcttctggtatgtggacagacgccagttatcaaggtattcagattatctttgccgccttaaaagaaacatggcatccgattattgttcaggttctctgtctcggtgtggcgttgattctgtttacttcttatcttggttcatatattaaatttcgcacttcgataaactatatctttggcgataagctagaacgcatcattaaatggctatattttttgccgccactgattgccgttaatatggaaatcccggtaatctggttaatggctgatattgctgtcggttttctggttatccccaacgtaattgctctgttcttgctgcgtaaagaatttattagcgaattcaatttattcagaacgcgtacacagcgggacactaattctgaaaaaacaacgcaaattacgcacgtaaatatgtcgaagagtgaagggaaagaggagtaaccatcgcggccagaacaggtaagatggtcagaagagtaacaaagcgcccactttccgggcgcttcgcacaggcatggttaacttgctttacgcacctgcgggagatcgaacgctttacgcagcgcgcgcacaaacgctttatcatgacagatcgttttaccggggctgtcggaaagtttagccaccggctttccgttacattccacgagcttaatcacgatattgagcggttttacctgagggatatcgcaggtcaggcgggtaccgatgccgaagcttaactgcacgcgagaggcgaaatggcgatagagctcgaccgcctttggcagatcaaggttatctgaaaagaccagcgtttttgtcagcggatcaatccccagcttttcataatgggcaatcgccttttcgccccatgcgacagggtctcctgagtcgtggcgtaacccctgataacggctggcgaattcaatgccgaaatcgcgtaaaaacgcatccattgtaatgcaatctgtcaaggcgataccaagctggtccggatattcgttaagccaggcggccaacgcggcacgctggctggtcgccaggtccggactgatttgttgatgcgcctggaaccattcgtgcgcctgagtgcccatcggcgtcagcgccaggcgacgcgcgagatcatagttgctggtgccgacgaaccatgactcctgctggagacgtttaactatcgcctgctgcacttcacgagagaaacggcggcgggtgccgaagtccatcaggtggaagcgggacatatcgagattggcggttaacgcagtgaaatcaaccagcttactttccagcgcgtcgagcgcctgatcaacacccgcgtttggcgagcggtagtgatgaaccagctcactgatcacggccagcagcggcacttcccacataatgacttcacgccacgggccggttaagcgaatattcagcttgccgttatcgttggtgacacagacttgagctgggttatagcgaaactcgcgtaaccagttcagataatccggtttaaaaaagggcaggccggagagccactggaactcgtcctccaggaggcgcaggtgctgcatcgcgtccacctgctcgcgaatagcatcggcataaatacccagcaggtcgtcgccacggcaacgaaactcagccgctacctgcacatcatagtagtggtgaaaaacggcttgctgcatatgcaacttataagcatctgtatccagcaacgagtgcagaacaggagaagcgaattgtgtcataggtgcgctgttgcgtcctctcacgggagcgtttagtacaataaacaactaagaaaaccgctggagtataccttgtttagcgatttattgaaccccgatcacaccataagctgtctttagggtcgagcgcatttcgtgccccatgttataaaaatgtagcgatgcgactgctaaccccttgaatttaaggatttctactgcgctgctaccatgctttggggcagtgatggggcatagcggaaaagttcctggttgagcagagaaacctgttctgcgctcttctctgacatccactttccatacaccttgtaaaccatctgtgcatcggtatgccccatctgcgttgctataaagtttgggttagcaccagctgataatgaccagcatgcataggtatgtcgtgactgatacgcgttacggtaacgaatgccggcacgcttgattatcggggcccaaattttattaatggaattaaccgcgtagtgatatcctgtgcgaggtccacgtttgacgcattgagggctgaatacgaacgtgcagggctgaatgacagattgtccatattcccgcaacttcacttcaacctcaaactgccggccaaggcgtgtcaactgggcctgattcctcagggcatcaatagctggttgaatgagatatatcaccctgtcagtacctgcgtcggtttttggcagggtgaactcatccgtctgggtaaggttgcgcttcacaatgatcgtcccggcatgcagatcgatatcttcccaggccagaccgcacaactccccatgcctcattccggtatagactgccagtgaccagagatttctcatctgctggtgtccgcatgcctggataaacctgatgaactcgtctgtcgtgagtggatctggttcccctttcgctttcttgagacggttaattccgctaaacgggttttcctttgcatagccgttatctgttccaaactggaagatctcggccatcagcatcatgtaattattcactgtggacgatttccggcctttaacctgagtccggtgatccttcttcattacctgaaagcccgtcagcaactccttcctgacatacagcaaatcctcagtagtcaccgcagaaaccattttgttttcgccgatgagtggaagcatgttttttatgatagattcgtacctactcatggtattagagctgatctccattctcttcagctcggaccatctttcggtaagctccagcacagtaatttcctttctatcctgaccgaaccgggcaaggttcggtgagtttgggaatttttccacatagttaaaattccccatccttatcgcaaaacaaaccgaagaacgcagttcgccagctatcttgcgattttttgcagtgtcagggataccaaggttttccctgacacgtttacctttatacagaaaccagatgcggagcgaaccgccgtggttttcgacgcctgtcgggtatgatgcattagccattaatccctcctgacgtccaggagcattgacgagtgtacagcttttcatgttgtcttcgcacctggttgattttttttctgcgcctcgatccactgatcaacggcttctctgttgtatatgcattcgctcgaaggcttcggatttccgtctggtgaaatgtgcaggtactcgcggcccagcatccaggattcttttctggcgcgggtaatggttccgggcttaagcccggtaaccgcaatcagaactttttcgctaacccacttgtttggcgtcagttggataatgttgctcatcgttttctccagtggccccgcagcgggccatcgctaatattcagtttgcctgtgctggcagatttctaagtttccggacgccgatcattgcggtggctacgtagctggtggcccggttaactacttcaacaggcacctttacgccatccactacaacggtgtaattggtaacgtgcttttgtctgccgtaatcgccgaacttttcatgatgcgccgccagtgcaacatcacatgcgcgacggcccaatggcgattgcttactgcgatttataaggcgcataaaacctcctcaggcgggagggcgtaacccctcccgatgcaattagccgatgtattccggtttcatatcgtccagggtgacgcggtacttatcgtgcagttcgtcgccaagatggcgtttagcagcgccaagcgtgctttcagctttagcaaacatctctgcggcttccggttcgccagggtttggaattgagttgatcactgcctcgactttgttctgtgcatcgacctggtaatagcgcttcactgctttgttttttaattcggtgaacagcgcagtacccagcaacgctttctgtgattcgatatccgcacggattgcttttgcctgatcaacggaacttgctgtatcaatgcgttcgcgaagatcgtcggcaacagcatcaacgttagctgccgactcctgcgcgctggtcctggtgctaacctcgctggtgatttcctgtacgctcatgcgctggactggagcagggttaatctcgcgttcttctcgttgctcaacctcatcagggctgtacacgccgaggatcacttccgggcagtacaggcgagcccaatatttaacgcccagataggcaatttgctgtttagggtttgaaacccatagcggagaattgcgggtaacaacgccggagaggtaaagaggttctccccaggtgatttcagattcacctcgcagaatggcaccaacctgaacgaacaggccgatctcgtcctcatctgtccagccacgaacgcgctcagtgacggtgtacttcccatttttaccgtttttatcgcgtgtgatttcctgtgtcctggtgcagcgctcccagtcacccccatagcggtaatgaaaacggccatgaatggcactggagcttgcgattactgcgttgaccagttgtgcctcgtaaccaagaacaccgttaaccaggtgtgttttctgagccacagcgtaagggttcatgccccattgcatagcctgcatgacgatagccatacagtcggctggtttccctgcaaggtgtgccggtaccgtcacctgtgagtctgccatcaggttagcgaaagctgttaactgacccagtgcctgaacgttaaaaattgcgttactggcagaaatggtgtttggtgcctgctgctcagtggtaacaatatttgtgttttccatgattttccccttatgcctgtacgcgcaacgcttcaaggcggcgcacatcaaaatcgttcagttcgtcggtgtagtcttctgtgataggcgctgaccattcaccagtgtcgaagccgtttgctatctctcgcattgttttgcggtattccagcatgccaagttccagcaactcggtagacgcctcaatgatggcgacccagtggtagttctcgtctttgttgacgaaaatccagaaaaactggtccagcgccgcagtttcgcagtacatggccgcgctcaggtgatagtcccgatcgatgatttcccggtgcaacttcgcacgcaggccttcctgcttgatgttccacatgctgatagttttcaggtcggcgccaatgcgcaggccgcccatatcgagctcaaggtcagggcgtacccgaacttccaacccggtttcctcatcaatcccaaaatagctaacctcgacagcgcggcttgggtgagtcagcaatttgccggcggtcgggtgctccagcagggctttctgaatgttcagcgcggtgctgagctgttggcgggtgaccagcactttcccttcggtgttctcccgccacgcatccagcaattcgtcggcgaataccactgccgggttgactgatttcacggcctgaatcagatcggccttcgtgccagagactttcaacggcgacgatttttgcgcttcctgagcgaccaggtcagggttgattattgccagttgctccagcagcgcgtcacggctgccgctggttttaaccggcgcgggcagggtgacgttgtactctttgatgcaggctttcatcgccgtggctgtatgtttggtgccgttttcaatgcgctggaattcttcgggaagctgctcatacgatgcataggtttcatctaccgaagctccaagcggcatctgcgacggcagggtggcgttgtactcttccagcagcgctttgatatcgtcagcactcagcagcgctggcaggctggcgttgtgcgcgtcgatgaactcgcgcagggtggcggtggtggtgaaagcaccctcagggatctccggctctacgctgaactccgcttcgaggttttccggctgtagagccagagcatgtaccaggttgcccatatcaagcactggagagcgctctttgacgatagttttctctacgtgacgcgcgttaaagtacatcagcgacacgcgagcatctttcacctgagttgagctgatcccattggcggcgtggtaaacttcgtttggtacaccttcatagcggcccggctcgaagtattccggccaggctgcttctggctcttcttgttgcgattccggtacgttttgttgcgcctcagcctgattctggttctctacggtaactgcttctttaccagtacccagatcgtcttcgcctgcctgcaccgcatcaccagcctgtttttcatcactgtcagctttttgaacctgcacattgctggtggtctccggattcgtttctgtgccatgagttgatgagttctgcattaaagcggacacgtcgaaaataccgttgccaacatttttaaccagttcaggttcggtggtcggctggcttgtcccggttttcacccattttgggtcgttcgggtcgctgatgccttccacatattcaccgcgcgcggcggcaagctgtcggttggcttcttctaccgcgtctttttccggagtgtgtcgggcagccgtgagagcttcctcggtggggttctcgtgatcagtctccgttaagttggcgttgatatacccctgaaggcgtccggggtagtgataaaactcagggtgtgcgcttcggatcagcgcgaaaatagcggcgcgggaataatccaggataccgggcgttgcgcgaagtgctgcggaccattctttgaacggactttcctttttctttacgatttcttttgcgcgacggtaaacgctgccaggtagctcatagatattaaagtccataggcaaagtggccattgcaatctctacgtccagagtatcgagagtgtgttcgtaatcagggttacggtcagtcttattgccaccgccagcgttggcgccgctttcagtgcgttgaatagccgatacacggttgcctttcgcccactccttaacgagcaaaccgcgatcgatatgctccgtctcgaaccatgttttaaggaactggataacagtcgccagttcaggagtttttccatcgacagggaatacttttttaacggcattcactattttgtgaatgtcatgttcaatggctttcttgaacgcttcaacattctcggcggcaagcagcaggttctggacatatgaattatcggtgtccatttcgagacgcagaatttcttttttctgggaggcgtcgacgtgataaagatactcaccttcacctatgtactgagcaagaacgcggtgacggagaggcatagttgcgacaacagtcagctcgggggctggggctgttgcctgggcagggctgttgctttcgttaccaaaattttcggtgtggtcttccagcacttcgcctgtttcggtatcaacaccatcgacgatatgctggcgcgccgcggcggcggcttcagatgatggcagggtgacgccggggatttgcgtccaggtcatattgtctttagcgagttgatagtaatcgcagaaagtgaggctcagttcgccttccggcggcagctcgttaacgacagggaaattagtagcgacagctttgaaataatctttcagcttcgcaccggatttaatcagaagataatccagtgttgcatttgccgcttcaaaatcatcactgcaccagagtacagcgtctttctggcctgatgatttctttgctttgcggactaaaaatacaggattagttccactcattgttttgtcctcaattcgtgtagaatggaggtgccttaacagcaccccgatatatctggttgttaggtccggttcgctttggtcggttggaccggacagggcacgcccgcttcggtgggcgttttcttaatggatggtctgataaaatttttctgagtaatcaagcttgtaacttcggtaattaccaaaccctgcttgttctccatcacttaccttgactgtgagcagcgaaatggcttttacagcacaatgaggactgtcgaactttccgagtacatatccaccgtcgagattttcgcaattgaataaagcaatgctcttattaactgctttcaggttcatttcgatttttacgatttccataatttctccagtcttaaattcagggtgtatgaagccacgccaaattaatggcgaatttttcatttcatatttcggatctactatttaactttcgtgcgccatctggtcgtattcagcacactgcctggaacaatattccttttctttgctcgccagttgcgagccgttgcgatagagaagtgtgttttttacttctttgccttcatcaatggatttgcggcagtaaccgcattgtttaagcatccggatctcctttctgcgccagcaggtagcagaggcggcggattaaaacctcaatccggttgagcgggacagcctgctgtcgagctggtctacgtgcgaaatcaatcattctcaccctcgtttgccttatcgccggccagcggaacgttttacacctgacaacgatgcgcttgttgtcgatgaaactaacgataaaaccaaaggttcgatttgtaaagcaaaaagtgcaactaaaagttctattttggagcataaaaatagcacctaaagaggtgctacctgtatggatgagttctttggttctattttttgaggtcgttaattagatcaaaaacgttgttcttcagcagatccatctcttggaggactgcttttgtatggaggataacacgcagtttctctgcttccgggagttgattgaaaagagaaagcaatgtttcttctttttcatcaaggactctgggtttaggttcagccctttcgccttcactttcatcccctggctccatgaagaaccaatattcaggccttccggtcaccgccgataaccttttcaagcgctctccgctggctacagacgtgccagaggcccactttctcacagatgtgtgagaaagcattacgcgccgtgagaggtcagccatagaccagccgttctcatccagaacttgctggatacgcttggcgaaaatgggatgaagatttttgttcatattcacattttacaaccttcagtttctttattcattggaactattagattgatttttgttggaacctaaagttttacgtgataatctccagctaccaactcgtagaactggagagccaaatggacaaccaattaaaaatcaaaatcagtaaccacatgactcaaatgagcatcggcgaacattttggtatctcgtctcaagctgtaggcaagtggctgagaaaaggagtaattcctccccgtcgcatcctgccgttatgtgaaattcttgaatggaaagtcactcctcacgagattgacccagcagcatacccaaacccaaccgatggcttaccaagccaagaggcatcagccaaataaccatagaggatatttacccatggagaacgcaattgcacgaaagttagacccaccagaaatcaacccgattgagatagagagcgtcctgctcaaccggcttgcatcagtagggcagaaatcatacgccgagcatatgggcatcagcgagtcgacagtcagcaggcgtaaagctgagggatatttctgcaacatggcgaaagagctggcttttcttgggattcaggccgcgccaccggaagcggtactggtatccagaaactatctcacagcagtagagattctcgctgatgccgggctaaaggctgaacgagccaggccggatgcgctggggtgggactgaaaatggcagcaactaaaaaggcgaaagccgcggtgaggggtcaccaacggctttctggtgcaaaaacggtaggtaattgcggagatgagtatgtcaaataccgctgaaatatacaaattccctgcgccgataccgacgcaacaggagtgccgtatggctgatctggaaaatggctatttacgtttagctaatcagatccaggacgccttgtgtatcgttgaactatcggggcgtgagttccgtgttttgaatgcgattatccggctgacttatggctggtcgaaaaaatcagatcgtattgccaacagcctcattgcagataagacaacactgaaggtaaagcatgtatccgaagcggtgctgagtcttgcctatcgtaacatcattatcctgcgccgtattggtcaaacaagatacatagggattaatacaaacctggataaatgggcttattccaagccacattgctcaaaatgtccggtgtcttttcctgatgatgaaattgccacatggattatttctgtacctgaaaccagggatagttatccccgaaaagggggaagggcatccccgaaaacggggatagttatccctgaaaacagggatagcgttttaccccattcagccatccctgaaaacggggatagttatccccgaaaagagggaagggcatccccgaaaacagggaacaccaaagacattattccaaagacaaatataaaagatctaaccccctttaatccccctaagggaaaagtgaagtttgatccgttgagtattcctgttcccgaatggctgaatgctgcgtcgtggaacgaatgggtcacataccgccagcaatccggaaagcccataaaaaccgaactgacggtaacaaaagctttcaggcttctgaaggagtgcctggatgaaggccacgatccggtaaacgtcatcaacacaagcattgccaacggctaccagggactattcaaaccgaagttcgctctcaacgaccgaagagctggcagagatgtgaaccacatttctgcgccagacaaaaccattcctaccggattcagggggtaacgatgaaaaacgtaatcggtactggcagtgcgcttgatcgcctgaaaagaattatcccagccagtgtgcagccgaaattctcgactgctgatgagtggcgggcatggcaggaagccgaagggcgtaaacgcagtgaagagcttgacaggatgaatcagaaatcccgcaccgagaagattttcgggcgatctggcattcaggatctccatcgtagctgtacgtttgctaactacgaagtaagcggggaggggcagcgaaaagcgtacacgatggcaaaaagttatgcccagaacttcggtagtggatttgcgagctttgtgttcagcggtggtccgggaaccgggaaaaaccatcttgcggcggcaatcggaaatcatctgctggccggcggtcatagcgttctggtggtaactattcctgacctgatgctcagggttcgtgagtgctacgacggtgggcaatcagaagcgtccctgcttgatgacctttgtaaagttgacctgctggtactggatgaagtcggtattcagcgcggaagcagtggtgagaaggtcattctcaatcaggttatcgatcgccgtctctcatcgatgcgacctgttggcgttctgacgaatcttaaccacgaggggctgttggattcactgggcacgagggttatcgatcgcctccagatggacggagggatgtgggtgaattttgactgggaaagctaccggaaaaacgttagccacctccggattgtgaaataaggggttaaaaatggcccgacctaaaacacaaagcgaacggatgattattcttgagcggattatcggtctggtgaaagagcaggggcgcatcacgacgaacgacgtcgttgcgatttttggcgtgcaccgaaccacggcggagaaatatctgcgtatcgcgctggagcgaggcggcttcattcgtcatggccgctgcggcattttccgagaccagcgtgcggtgattgattatgacctcaggcgatacagcagtagtcaggtaacgggattttcagcgctgccggtgctggagaaaagcccggtaatgcaggtttatggagcatccaaaatgagcatcaacaaggggggagcccaatgagcaacatcgacaaacgggcgcttcgtgaagtggctgagagggctacgccggggaattggcgccgcacctcatcactgttcaatggcatcacggtaacgccattttctctttgcggtgaagaagtgacgttggcccatactgttgagaaacgtgacgcggaatttattgccgccgctaaccccgccaccgtgctggcgctgcttgacgtgctctatgagtttggagaggatgaggtggccatctctgaatacgtcacaaatcttgaagatgctttgcgagttgcggcagcacctcagcaggaggaatgatagctggttaaatccacagcagaaagcaaaagcattattaggtacaatcacactaactttttgttgttaattatttgatgaattacgaggataagctcatgtatcagcgaatgatttttgaagaaggaaaagagccaaggttgtattcaagccaacatgactccaagtttatcccaataagtaataacaatggaaaagttcaaaaggttcctgttatggagttcaaggataccagaggagatgttttttatgcttacaactatgcttattctggtaaaaaaccatcaaatgacgaaatctataaggctattgatgagctaaagccaatcggtgaaaaattcgaaatgtctaagactataagcgattagataaatctgttttcaacattgcagcaaaatcacaggaagatcgagacaaagttagcatggcgatatatggaaatgtcggagcagaacaccaagaagtaagcgtaatttgaatgaatgtgaacccgccgagtacgggttttcttttatctgaacccgctgcggcgggttttttgcctaaaatgtgatatgaaacaacacactagcctttgcaaaaagtgctattcaccccttgaatattctttctaacaggtatactgtgtttatatacagttgttgaatgtagagggaattatgagaattgaacttgttatcagccgggcaaaacagcttccggaaggtgccgttcctgcgcttgaaaaagaattaattacccgtctccagaatcagtatgaaaactgcaacttaaccatccgtcgaggcagtcaggatggtctgagtatcgtcggtgctgctgatggcgataaaaaacgtatacagagcattctgcaggaaacgtgggaaagcgctgacgactggttttattaacattgcgcttaatgctggcgcgcatttttcagaatatcgcaatttgcgtatccctttgatgctgctgccgacaatttttaaccgcgtccgtgtgtcgctcaggggggttacgtggcagagggagtcctatcagatcttgctgataatttgcgggtgactataactgatgctaagggaatagaacttttgtcttttagacttgcatcaggtgatcgctatatcctatcaacccaaaacggttctgtaacaaaccgaaagctatcaagagatgatttgtactggtctaaggataccattatggaagttgtcagagagatgggctctaataattgacttaacaataagcacgcaatcataattatcgcactggcctgaacaaccagtaacctgacaattatgcgccacggagaataccatggcgcacgaattacaactcatcaagcagtcatctggaattctgatccccgctacgccggagaccagcgaaattctgcagtcaaaaattaaactcggtgccgtgctggtggctgagttccgtcaggttaggaatcctgcattccatcgccgctttttcgcgttgcttaatcttgggtttgaatactgggaacccaccggcggcaccatttctgccaatgaacgcaaactggtaaacggttatgcaaagtttctcgctgcatatggcgggaatgagagcgcattactggatgcggctgaacagtatctggaacagattgcaaaccgccgggtaacaaacggaattagcctctgtaaatctttcgatgcataccgcgcatgggtgacggttgaggctggccactatgacgccatccagttaccggacggcacccttcgcaaacatccccgcagcatcgctttttccagcatggatgaggtcgaatttcagcagttgtataaatccgcgcttgatgtgctctggcggtggattttatcacgtacatttcgtactcagcgcgaggcggagaacgccgccgcccagctaatgagctttgcggggtgatggcgatgaaatactcctggttccatcatcacgactgcacaaccgagcaggccgacacgctgatatcggattatcagaagcggggcgtaaggacagaaaagagcctgaaccctgacttcattacctggactgtcagcgcgaaattacctgaatatgcacaccgggtgcggacgccaaaatccttacgccaaaaggtctgggggtgaacatggctaaattaccgcgccgtaagtgcgcaaacaaagaatgccgccagtggtttcacccgatacgcgaggggcagatcgtttgctcgtaccagtgcgccagcgccgtcggcaaagaacagaccagaaaagctcgcgaagccgcgcaacgtaaggcgcaatcccttcagcgcgccgctgagaaaaaagaacgcgccgcctggcgccagcggaaagccgcggttaagccgctgaaacactggattgacttgacgcagcgcgccgtaaatgacatttgccgcgaaaccgaactggcagaaggactcggttgcatctcctgtggaacgaagacggcattcgcatggcatgcaggccattacaggagtacggccgccgccgggcatctgcgcttcactcgcttcaacatccatcttcagtgtgatgtctacaacgtctacaaatcagggaacatcgaagcatatcgtgccgcgctggttgagcgttacggggaggcggcggtgctggcactcgagaacaataacaccccgcaccgctggacggtcgaggagctgaaggaaatcaggctcgcggcactggcggatctgcgtgcgctaaaaaagctggaggccgcatgaaaccagaactgatcgagatactccgcatgcgctggttgcgtctccgaatttatcgataccggggatcttttcctgtggcatatcgcattcttcgtaattacgtccgcattgaagcaaaacgggagcatcgaaatgaatcttgagtccttaccgaaatatttttcacctaaatccatgatgcccggcgcagtaccatgcggaataacgtctgatacgctgactattactgacgtaatggcatctctcgggctacttactgcaaaagccgcagtgggtattgaattgtatctggcaaaagccggggttttatcttctgaaaatatcatcgcctacatcaggcaattagcagagcagcgtgcagaacggcatggggcattacggaaaatggaaaagggtaagcgctcaaaatttctcgacactatggcgcgttatgtatttcgcgattattccctcagtgcggccagcttggtgacgtgcagtagctgtcatggtgctaaattaattgatgctgaggttttcacgaacaaggttacttacccggatggtaagccaccaaaatgggtaaaagatacgaaaggtatttctccgtccgactgggaggtgtggaaatcagttcgtgagcaggtgcgcgtagtgtgtaaggcgtgtgatggcaaaggccatgtgaaaaatgaatgtcgttgccggggacgcggagaaattctcgataagaaaaaatctgagttgcagggcgtgccggtttataaaaaatgcccaagatgcaagggaagaggctacccacgtctcaaagataccgagatttttaaagcactaggagtaacggaaatggtatggcggtacaactataaactgtttttcgatcggctggtggagcattgccatattgaggaatcgtatgcagaaaaggttctgggaaacgtgactcgatgaccaaaataatttagctattgcaaaattaacggaaaatggctaatctgattccaacgatgggttattatgcctgtgacgttacaagaattaagaacctcgcctcggcggggtttttgttttttttggtggtatattcccttggtgtcaaatcacagggggggcgatatggggttctattacgtttttcaatacaagccgaaagggatgtcgtcgggtaagcatttaaatgtttccgaggagttttcggaccggaatgaggcaaagagagcgaagtccaggcacatgattaatgatccagattgtgtcttctcgggaatcgtgcaggctgattcgccggcagcggtacttcaagaagtacaggctgaatctcttaataggctttaacggatttaacttggcagtatccacattaccaatttcattaggtcgcttcggcggcctttttctttttcaggcaccgggcatcatccgctacgtgcttggttgataaatccagcccgtgaagcctgcccctttcatcacacactgcgccatccgagctatcggaggtgaggcttatgaaaatgcacaacgatccccattcaatggactcacaatctatttttgctggctcacaattactgccaatggaaaaaacttctcatttggctctgagcgtcggatttcgctctcacttagcgtgagtccacgtccgatttcagttgcagttattgtgagccaaaatttgcgctgattgcgagtctgacttttttcgattgtgagtcgttacagatagccgccgggccagacaccacaacggtaccaggtggcgttatgtgctagaaaccgaaattcttgaacatctcattactactcatatcgttggctggcgcacggttcatcgactccatctgcttaatcaaccctatgctagcaccaacaggccccccgacgctgaaaccgacgctgctggagcgggttttgctggtgctactgctgtgggtttgactacgggtgttacagttgctttggtgtgtccgtgtgagaccattttcgttgagctggctatcttcactttgggtgcagtttccctgtgactggctgtgactgtctcctgtggtgtggttgcggctatccgtgtgccactcgctatagcctcccgccggcgcaatgattccgaccgatgtaccgtgggtggcatagggaggcatgaccatgccactacagccaccgagcagtaacgcggtgccgacgataaaaatgaacttacccagagcggtgtttttcattagttcctacctatttcttctcgttggttatttctatgccctgccttggcagggctcgctattattcattcttcaactgtgagatcaagttattttaattaaatcggtattattcttaattgtgttctttatgaataaatatcctccggctatgccggaggatatttattatttcctctcataactgagaggccccacacaaccagagggggatgaatgtccgaatcgatttctggtactgggttagcaggtggcatcctgacaggagccagtgtctatggactgctgacctgtattagctcagacctgaactggttactgtgttgtagcatcgtgggattttgcattttttgatgagtgtcaattactaaattcgtaggcgattcttggtggtgatgtgtgacccatctcttttaaaatgatattggtatactcgactaccgggcctcttggattactgtcttctttgtcctgaaggtgagtcaacgcgtgtacaacttcatgaataaatgagcgtgttgtatcaaattgttgtgggccatcattactttcatagtactctggtattgaatcatcgtctgtatcatccaggttgagggcaatcacttttctgccttctgaactctccaggtcctcatcagttacggtagtaccaaagttttctccggctcccagcaaccagcgttgttctacatcatgcaattcctggtcgtaggcataattcatcagtctgcggaatgtcccgctttgagtgtatgcatcttcaagtatgcgtgatagcacctcacggcattcatcataggtatcatcatcaatttcgatatcaggatccattcctcctggtccagagataaggtattcagcaagacacattggttccagcctggctttatcatcggtagcaagaccatcatgttggaggcgtaattgcgaaggattatcttggtgttctggaaggtctggaaataccttgctgtcatgaggatgggataatccatatgttgacatcatattattgataaatattggtttaattcccgttggcatgatgagttacacatcctttttattacatggaattaacattctataaatagcatgtttttgtcaaacagaattcactcagcacgcaatcaattaaactaaaagctaaatttgcagtatttgtgcctcacctccattaaaattgtactctgcgtgattttactttcagattctgcaaccacaggcaatcctgttttacaagatattaaaccctgcaacccaaccatttcactcactctagttaccatccgaaatcatcggaggtgaggcttatgaaaatgaatgacaagactcctgaattctgggctgcggttttgaccggactcaaaaatgcgtggccccagatacttggggcgttaatggccggactcattgcctacggccgactgatatacgacggcgccacccgtaaaaataaatggcttgagggcgtcctgtgtggcgctctttccttatgtgtcaccagtgcgcttgatgtggtaggcctgccggtttccatttcgcctttcgttggcggaattattggctttgtcggtgtggacaagctgcgcgaaatcgcaattagcgcactcaaaaaacgtgcaggggttaatgatgagaatcagtgaaaaaggcattaccctaatcaaagagtttgaaggttgtagcctgacagcttatccggacccgggaacggggggagatccctggacgattggttatggctggacccactctgttgacggtaagccagttaagcccggaatgatgattgacgaggctactgccgagcgcttgcttaacactggtttagtcggttatgaaaatgatgtgtccagactggttaaggtcaagttgacgcaaggccagtttgatgcgctggtgtcgttcgcgtacaacctcggcgcccggacattatcctcatcaactctgctgcggaagctaaacgctggtgattacgctggcgccgctgatgagttcctgcgctggaataaggctggtggcaaagtactgaacgggcttacccgtcggcgtgaggcggagcgtgctctgttcctgtcatgatgttcaactggaaaacgatgtttgttggcctgttgcttgtctcgctaattgttgccggtcggctggcaaatcactaccgaaataacgccatcacctacaaagagcagcgcgataccgttactcataggctgacgctggcgaacgcgacaattaccgacatgactaagcgccagcgtgacgttgccgccctcgatgaaaaatacacgaaggaattagccgatgcgaaagctgagaatgatgctttgcgcgatgatgttgccgctggccgccgtcgcctgtacgtcaacgcaacatgccccgcagtgccgacaggtaaatccacctccaccgcccgcatggataatgcagccagccccagactggcagactccgctcaacgggattatttcgccctcaaagagcgagtgaagacgatgcaaaagcaactggaaggggcgcaggcgtacattcgcacccaatgccacggtaatgcaggaaaaactagtaaccaatggtgactgtattaaaaaggtactcccgggcagggggcgccacgggtggcttcgggctcgcgggaatcggctgatttttgattttttagtctctgtcagcactgaaaaataaccttaaaaatcaatacatttactgttttcagtgtcgaagtggtacgttttttgttcgacactgaacgccattttcaccgtatacaggaaaagagcacgactgtggatcaggaaattaaaagcctcgaattaaacatcacacagctttcggccatcactggtgcacaccgacagaccatcgccagcaggctgaagggcgtaaaaacctcaggtgggaacggtagtaacctgaaaatctaccggctggtggatattctgaccgccatgatgacgatgccggctgttaccggggagaatgaccccaataagatgaaaccctcagatcgacgggcatggtttcagtcggaaatgacgcgtattgagctggaaaaggagatgagaactctgatcccggccagcgaggtgctgagcgtttatgctgtcatggcaaaaacggtcgtcaagacactggagatactgccggacttactggaaagggatgcggcattgccgcctgatgcgctggaaatgacgcaaaaaattattgatcaactcagggaagatctggccagcatgacataccaggcctgcgcggatgctataaacggagatgatgatgacaacggtgacgaagggcaagaggaagagcaggaatagtttagcctctgccgttgttgccggatgtgatatctcatcgatgttcaggccgccgcgcaggatgaaaatatcggatgcggtcagaaaatatatgcgcgtaccacgcgatgcgggaaattctgtggcatgggaatccaccctgaccccctatgtggtggaagccatgaactgcctgtcatcacgcagctacgatgccgtggtatttgtcgccccggcaagaaccggtaagacgctggggctgattgacggctggatttcctacaatattgtctgcgatccgtctgacatgctggtggttcagatgactcaggacaaggcgcaggagcactcaaagcggcgtctggcaaagatgtttcgccacagtccggcgatagcaagaagactcagccctcaccgtaacgataataatgtgcatgataaaacgtttcgtgatggctcgtttctgaaaattggctggccatcaatcaatgttttttcgtcttcggattttaaatgtgtggcgctgactgactacgatcggttccccgaagatgttgatggtgagggggatgcattctcgctggcgtcgaagcgtaccacaacgtttatgtcgctgggtatgacactggtggagagctcgccggggcgggaaattaccgataccagatggaaaccgtcatcaccgcacgaagcaccgccgaccacaggaatactttccctgtacaaccgtggcgatcgtcgtcgctggtactggccgtgtccgcattgtggcgaatattttcagccatcaatggcgaatatgaccggctatcgccatattgccgaccctatggaggccagtgaagcagcgcggattcagtgcccacactgccataagttgactgaaccacagcagaagcgtgagctgaataatcgtggcgtctggttgcgggaaggtcagcacattgaccgcgacggcaatattaccggcgaagcccgccgctcacgtatcgccagtttctggatggagggaccggcggcggcttatcagacctgggcgcaactggtttacaagctgctgaccgccgaagaggaatacgaacgaaccggcagcgaggaaaccctgaaagccgtcatcaatacggactggggattaccctatcagtcccgtcgctcgctggaggcacgcagcggtgacgcgctgatggcacgcgctgaggacgtatcaaaacgtaccgtttctgacggggtgcgttttattgtggcaaccgttgacgtacagggcggtaaaaagcggcgctttgtggtccaggtagtgggctatggcgcatatggtgaacgctggatcattgaccgctacaacatccgttattccctgagagtgaatgaggatggcgaaagccagcctgtcaatccggctgcaagaccggaagactgggatttgctgaaaacggatgtgctggaaaagacgtatccgctggcggcagatcctgaacagtttatgccggtactggcaatggcggtggactcaggcggtgaagacggtgttaccgataatgcctacgcgttctggcgaaggtgtaagcgaaaaggcgttgccgggcgcgtttatctgttcaagggagacagtacccgacgcgagaagctgatcaccaaaacctatcccgataacaccgaacgctcagaacgtcgggcaaaagccaggggggatgtgccgttgtatctgttacagaccaatgccctgaaagacagggtagctgccgcactggagcgtgaggagccgggggcgaattacattcattttcctgactggctggggccgtggttctacgaggaactgacctatgaagagcgcagcgcagacggaaagtggaaaaaaccgggacgcggtaataacgaggcgctcgatctgatgtgttacgcccacgcgctggctattctccgtggctatgagcgaatcaactgggaaaaaccaccaggatgggctcgcttaccggaaaaagacgccgcaaaaaccacgcagcctgttgaggttcgccagcaggagcaacacgaaggaggagagaaagccgtgaaagccaggaagaaaaaaattttacccgcctggggcggtggttccggaggagggtggttatgaccagggcagggctacaggagttgtacaacgcctatctggaggccgagcttgctgtactgaaaggcaagtccatcatgcttaacggtcagtcaatgacaatggaaagcctggaggaaatcaggaaggggcgccgcgagattgaagacaggttacagcggttaaataatccgcgacggcttttcacccgggcgaggttgtcatgaattttatcgataaagctatcagcatgatgtcgccgggatgggctgtatcaagactccgatcgcgggcagtaataaaagcttacgaggctgcaatacccacccggacacataaaattaagcgtgaaaaccgcaacgccaatcaactaaaccagattgccggaaagtccctgcgggagcaggcccgctggttcgataacaatcacgatctggtggtgggggcgctcgataagatggaagagcgcgttatcggggctaaggggatcatcgttgagccacaaccactgacggtggccggaacgctgaataacgcgctggcggaacaaatccgcgccagatgggcagagtggtccgtgtcgccggacgtgaccggacaatatacgcgcccggtactggagcgccttttgttacgcacatggttgcgggacggggaggtgttctcccagatggtggcgggaaaaatgccggggcttgagccggtggcgggcgtaccgttctggcttgaggcgatggaaccggattatgtcccgatggaacagacggacagtacaaataatctgattcaggggatctattttaacgactggcaaaggccaaaaagttacatcgtctgtaaatcctggccgggatttgccaccgctatggtggccaccaagcttatcgatgcagaaaatatgctgcatcttaaattcacccgtcgcctgaatcaggcgcggggcgtcacgctgctggcgccggttattatccggctgctggatctgaaggagtatgaggacagtgaaaggctggccgcgcgtatttcggcggcttttgccatgtttatccggcgcagtgacgcaatggtacaggatggtgacgcgccagattatgcggataaagaccgcgatctggatattgaacccggcaccattctgaaagacctgttgccgggagaggatatcggcaccatcaaatctgacaggccaaatgccaacctggagtctttccgtatggggcaactgcgggcggttgccgcaggtgtacgcggaagtttttcttctattgctagaaactacgacggcacctacagcgcccagcgtcaggagctggtggaggctcaggagggatacgccattctacaggataattttattgctgccgtcagtcgcccggtttaccggcgatggctggcgacggcgattacggcgggtgtgatagatgtgccgacggacacggacatggcgaccctgtttaatgccgtgtattccggtccggttatgccgtggatagatccgctgaaagaggcgaatgcctggaggatactgatacgcggcggggcggcaacagagagtgactgggtgcgtgcccgtggcggcgcacctgctgaagtgaaacgccgccgtaaggcggaaattgacgaaaaccgtaagctgggactggtatttgatactgatccggcacatgacccgggggaacaggataatgccggaagtgaagacaacagtggcggcgataaaaatgccgccggtgatgacagcagggaacggacgcggggagggaagcagtaatagctggtattccatcagggctgcagccaataacacggcggaagtccgcatttatgacgagattggtggatggggaatttcggctcgctggtttgcagaagaactggctgcactgggacagattaaccggataaatctgcatattcattcacctggcggagcagtactggacggaatagccatttataacctcctgaaaaatcatccggcgcaaaaaacggtgtatatcgatggaatggcctgctcaatggcatccgctattgcgatggtaggtaatcccatcattatgccggaaaacgccatgatgatgattcataagccgcgcggagtggcggggggggaggcggaggatatccgggaatatgctgacctgcttgacaagatcgaaagcgtcattatccccatctataccgaaaaaactggaaaaacgcctgaagatattgctgccatgctggcaaaggagacctggatgagcggcgcggagtgcgtcagtgaagggtttgccgacaaactgatacagcctgtaaaagcaatggcctgtattcattcaaaacgtgttgaggagtttgagcatatgccacagagcattaaaggtatgattatcgccccgcagggcaatgcaggcgcgcaaccgcagccacaggcaaaagcccctgagtcacagattcagtcgcaggctcagtcgctggtgactgtagatgaaaatgccattcgcgcacgcctgcaggaagaacagcgtaaccgtatcaccggcattcagaatgtgttttcactttccggcgatcgttatgcctcgctgatggcaaagtgcattgctgatgtggattgctctctggaaatggcgaaggacagactgttggccgagatggcgaaaggtattacgccgactaaccagctgaatggtccgcagaatcgcgcagagtttcatgccgggatgtataccggaaacggtaatattaccggcgacgccgttcgcgctgccgtgatggcccgcgcaggctatgaagaagcgcagaaggataacccgtacaactgtatgaccctgcgtgaactggcgcgaatttcgctggtggcgaggggtacaggcgtgtccagcatgaatcccatgcagatgatcggcatggcatttacgcacagcacctccgatttcggtaacattctgctggatgttgcaaacaagtccattctgcagggctggcaggaagcgccggaaaccttcgatgcctggaccaaaaaaggacagttgtctgatttcaggattgcgcaccgtgtgggtatggggggattcagttcactgcgtcaggttcgtgaaggagcggaatacaaatacgtcaccacaggggataaacaggcgaccattgcgctcgctacctatggggagctgttcagcattacccgccaggccatcatcaatgatgatatgaatatgctgacggatgtcccgatgaagctgggacgtgcggcaaaagccaccattgccgatctggtttatgacgttctcatcagtaaccagaaactgtccagtgataatgtggcgctgtttgacaagacgaaacacgcaaacgtccttgaaaaagccgttatggatgtggcgtccctggataaagcgcgccagctaatgcggatgcagaaagagggcgatcgccacctcaatatccgtccggcatttgtactggtgccgacggcgatggagtctgtttcaaatcaggtgattaaatctgtcagtgtcaagggggcggatattaacgccgggatcattaacccggtgaaagatttcgccacggtgatcgcggagcctcgtcttgatgacgccagtcagtccactttctatcttactgcagcaaaaggcagcgataccgttgaggtggcttaccttaacggcgtggatgagccgtatatcgaccagcaggaaggattcacggtggatggcgtaaccacgaaagttcgtattgatgcgggcgttgcgccggtggattatcgcggcatggtgaaatgcaccgtataacccactaaaagcagacattaagcgatacggccctgacgggctttttttatacctgaaatccggcacggcgtgccggaaaggagaataaccgtggctaagaattacgtggaagacggcaaaacgattgaaattgtggcgaccacgtcactaaagagcggagatctggtacaggtcggcgatatgttcgctgtggctgttaccgatattgccgccgggagcgccggaaccggcatcgcagaaggggtattcagcataccaaaactgacaacagaggatattgccgtcgggaaaaaagtgtatctgaaggataacgtggttcagacggatgcaaccggcagcctgccgtatgtcggggtggtatgggcgccagcggcaaacggtgatgaaaccgttccggtaaaaattaatggctgacctttttgacgggatgaaaaggcgcatggatgcacttatcgcagaacgcttcggcatgaaggtcaacatcaacgggactgactgcatagtggtggagtctgattttctggctgaactggggcctgttgaaggaaacggaaaaaacgtagtggtgttttcaggcaacgttatcccgcgccggggagacagggtggtactgcggggcagtgagtttaccgtgacccgtatccggcgttttaacggtaagccacaactgactctggaggagaacaatggaggtaaaggggcttaaagaggccatttcagtacttaaagaacttgatcgtggatatgtgacccgggcaaaaattcgggccattaaccgggtggcaaaacgggtggtcagcgtgtcagttcgcagtgctgctgctttggtggtggccggagacaaccgacggcagggtattcccgtcagaacggtaagacgtcgcgccagagtcaggctggccagagcggacaagccttttgccaacatttatgtgaactgtgatccgctgactgccatcaggttactgagttcgccaccatcaaccccgatgagggggagaaaaggtaagccgctacgtataggaaaataccgttttgaccgggggtttattgcgcaggctccgaacggatggtggcaggtatttgagcgttccggtgccggaagatacccacttaatgtggtgaaaatcccggttgctgatgcattgcgccatgcgttcaacacgcaggttgttttacagatgaaaacggagatgcccaaagagctgaagcatgaaatcagttatgaactgaggagattcactaaaaaatgacccgacacagtgcagtacggcaggccattattgccgcattaaaaaagaccgatgatggctccaccacgttttttgacggtcgtccggtcgtggtggaggaggatgagttacctgcggtggcggtgtacctgagtgatgctcagtataccggtcctgaggtggacggtgatatctggagcgcggtgctacatgtggaagtatttctgaaagccactgcaccggacagcgccctggatgaacagatggagaacagggtgtatccggcactggggagcgtggcgggactgggtgacatcatccggacaatgtcggcgcaggggtataactatcagcgagacgatgaaatggcgatgtgggggtcagccgatctgagttacgacatcacctattccatgtagaggaaaagagaatgacagacacgacaattcctaatccacttgcgccggtaaaaggcgcaaataccacattctggatgtacaacagcgagggtgatccgttcgccagcccgctaagtgataataactggctgaggctggcaaacgtaaaagacctgcagccgggagaactgacggcagatgcagaagataataactatcttgatgacgagaacgctgactggaaaagtaccacacagggacagaagtctgccggggatacttctgtgacgctggcgtggaagccaggtgaggacgtacagaaaaagcttattcaactgttcacgaccgggcagaagcgcggattccggatcaagtatccgaacggcactgttgatgtgttcagaggctgggtgagctcgctggggaaaacggtgcagagtaaggatgagatcgcccgtacagtaaaaattaccagtgtgggccgtccgtacatggctgaagaggatgcaccggaagtggttagtgttaccggactgacagtggaaccgacaaatgccaccgtgaaggtcggcgccacaacagcggttacgttcacggtgaaaccggataacgtgacagataaatcactgcgtatcgcaacgtcagatccgactacagccaccgtcacgcaggcggaaaatattgccactgtaaaaggtgttaaggcaggtacagtgaaaattattggcatgacaacagacggtaattttaccgctattgcggatattactgttcaggcataacccacctctcgtcctgttttggggcatttttttcaggaataaatcatgtttttaaagaaagagacgtttacccggggggatgcgtcggtggcattgttcgagttatccggcctgcaacgtattgagtacctggagttcatccagaaacgtactgcgaaatatgacacggatatggatggtacgacggaagcggataagcgcgtggcttatatgcaaatggcactggaaattaatgcctggctggtatcccgctcgcttctgaatggtgattcttctcaggatgcagacacgctttatcagtcagtacaggcgaagtggtcgtatgaggcgctggacgcaggcgcagaaagtgttctgatgctcagcgggctgtctgcggataagaaagataacgccagtgattcaggtaatgaatcagaggacatgacgccggaaaagtcctgaataatgagcttcattttgtccggcaactggcccgggagttccggcggcctgactggcgccggatgctggacgaaatgagttcaactgaacttagtgagtgggctgatttctttcgggaaaacagtttcagtgatgccctgctggatgcggagttttccacgctgaaagcgcaggtgttcatgctggtgacggggaaagaaatcgatgcagcggacttcagtttgctgacattacccggagcggtacagagcatgacggagcaggatctgcttgaagtggcagtcggtattccgggaggagtgagatttgagccagaaagtcggtgatatcgtcatcaacatggatgttgatacagctaaagttgccgccggtcttcagactgccagtaacgggctggggaagctggtggacagcagtgatctcgttgaaaaacgcatcaagcgatgtatggagtccagcgccagaagtgtggcggcatcggcaaaaagtatcagtgccgctatggcgcaatcacaggttgccacacgcacacagagtgacgctatggcacaactggcgcgtgaggcgaacgaggccagagaaagggctgtcgacctgaatcagaagttaagggcggaagctgcgcaggcagcggtggttgcacaggctcaggatgcagccgcagcggcattttaccgtcagattgacagtgtaaaacagttaagcggtggtctgcaggagttacagcgtatccaggcgcaggtacgacaggcgaaaggacgcggagatatttcacagggcgattatctggcgctggtgtctgaagctgctgcaaagacacgcgaacttaccgatgcggaggcgctggccacgcagaaaaaagcacagtttatacgtcgactgaaagagcagacggcggtacagggcctctcccgtactgagttgctgcgggtgaaggcggctgaactgggggttagcagtgccgccgatgtctatatccgcaaactggataccgcaacaaaatccactcatgcactaggactgaaatcagcaatggcgcgccgcgagataggcgtactgattggtgaactggcacggggaaattttggcgcccttcgcggttccggtatcacgctggccaaccgggccgggtggattgagcaactgatgtcgccgaagggcatgatgctcggcgggctggttggcggtgtggctgcggcggtttacggactgggtaaggcgtactatgagggggcgaaagaaagtgaggagttcaataaacagcttattctgaccggaagttacgccggaaaaaccacaggcaagcttaatgaaatggcgaagtcgctcgccggaaatggcgtcacgcagcacgacgcggcaggagtactgacccaggtggtcggtagcggagcgtttaccgggcaggcagtggcaatggtatcccgtaccgcggccagaatgcaggaaaacgtggggcagtcagtggatgaaaccatccgccagtttaaacggctgcaggatgatccggtgaacgcggcgaaagaactggacagggcactgcattttctgactgccacccagcttgaacaaatcagggtgctcggtgaacagggaagaacggctgatgctgcgaaaattgccatgtccgcgtattcggaagagatgaataaacgggcgggtgacgtacatgataatctgggctggatcgagaaggcatggaatgccgtgggtgatgcggcgaagtgggcgtgggatcggatgctggatatcgggcgggaagatacgctcgatgaaaaaatcgcgacactgcaggaaaaaatcgcgcgcgccagaaaaacgccatggacagtgtcttcctcccagactgaatatgatcagcagcaactgaacgaacttcaggaacagaaacgccagaaggacctgctggatgcgaaggcgcaggcagagcgtaattatcagaagactcagaagcgccggaacgagcagaacgccgcgctgaaccgggataatgaaactgaatccctgcggcatcaacgggaggtggcgcgcattaccgccatgcagtatgccgatgcagcggtacgcaatgccgcgctggagcgtgaaaacgaacgccataaaaaagcaatggcacggcagaaggaaaagccaaaggcttactacaacgacgaggccgggcgactgcttttgcagtacagccagcaacaggcgcagactgaagggctgattgccgccgcgaagctttccacgaccgaaaaaatgacggaagcgcataagcagcttttgtcatttcagcagcgcatcgctgatttgtccggtaaaaaactgacggcggatgaacaaagcgtactggcacataaggatgaaatagcgcttgcgctacagaagctggatatctcacaacaggatttgcaacaccagaatgcctttaatgaactgaagaaaaagacgctcacattaaccagccagctcgctgacgaagaatcccgcgtcaggcagcagcacgcactggcgctggccacaatgggtatgggcgatcagcaacgtggccggtacgaagagcatctgaaaattcaacagcactaccaggaacaactggagcagcttaagcgcgacagcaaggcaaaagggacatacggttctgacgaataccgtcaggcggagcaggaacttcaggccagtctcgatcgccgactggctgagtgggcggattataacgcgaaagtggatgctgcgcagggagactggacgcagggcgcgtcgcgggcgctggataactttctggcgcaggggggcaacgtggcaggcatgacggagaacgttttcacaaacgcatttaacggcatggcggacagtatcgcgaattttgccgtgaccggaaagggcagtttccggagcctgacggtctccatcctggctgacctggcaaaaatggaggcacgtattgcggcttctaaactgttgggttcagtactgggtatgttcgtctttggcgcatcagcaggcggaagtacaccatccggggcatacagttcagcggcgctgtcggtcattccaaatgcggacggcggcgtgtaccgctcagcaggactcagtcagtacagcggcagtattgttaacagaccgacgttctttgcatttgccagaggggcggcagtaatgggagaggccggtccggaggctatactgccgcttcgtcgcggtactgacggtaagctgggggttgtggcagcaggttccggagggatggcgatgtttgcaccgcagtatcatattgcaatcagcaacacggggccggaactgacgccgcaggcgctgaaggcggtttatgatctgggtaaaaaggcggcggctgatttcgtgcagcagcaggggcgtgacggcggcaggctgagcggggcatatcgatgatgaaaacctttcactggaaagttgacccggacatgggggtggattcggaaccacaggtgtcggtggtgaggttcggtgatggctacgagcagcggcgtgcatccgggatcaataatgacctgaaaaaatacagtgtgactatccgcgttgaccgggaggatggtccgggactggagggctttttgtcacagcataacggtgtgaaggcgtttttgtggactccgccttacggataccggcagattaaggttgtctgccggaaatggagtgtgaaagcgggattgctgaaaacaacattcaccgcgacatttgagcaggttatttcttagtatttttgatcgaaacgatcgataaatatgattgaactttctaacctgctgctgtttcactgagcccgcacagtcaataatcaaaaaaaggaaatgttatgaaaaagattgtcgtggcggttttagttggtctggcgttaggtagcatcggcgtggctaacgcagcagggtataaaaataccgtttcaattggatatgcctacacagatttaagcggctggctttccggtaatgcgaacggtgccaacatcaaatataactgggaagatctggacagtggattcggggcgatgggttcagttacatacacctcggctgatgttaataactatgggtataaggtaggtgatgctgattatacctcccttcttgttggtccttcataccgttttaacgactatctgaatgcttacgtgatgattggtgcagcaaacggacatattaaggataactggggaaattctgacaataaaaccgcctttgcttatggggcaggtattcagcttaacccggttgaaaatattgccgttaatgcgtcttatgagcatacaagtttttccactgatgctgacagtgacgtcaaagctggaacctaggtgcttggcgtaggttacagcttctgacctttaacatcgatacagatttaatgccctccagtgagagggcttttttatgggtaaaacgaaattatgacgatatggctatgttgctgttatttctcaatgacaccacaggcaaaacgtgcaccgccaccacccagtggagcaggtttatcggagtaattgtcaccgcctttatggatcatcaatgagtgacctttcagttctgacagtgatttaaggcgtggtgccagtaacggatacgtggctgtaccatctgcattgacaaccagtccaggcagatcccccaaatgccctttgtcattatatgggccaagatgtttcccggttttttcggggtcaagatgtcctccggccatgagcgccggaacctctttaccgtctttcattcccggcatacaacttgggtttgtgtggacatggaagccgtgaattcctggcgtaagaccatttaggtgaggagtgaaaagcagaccgtaaggtgtctctgaaactgtgatttcacctatgttttctcctgttccgctggacagggcatcgttcatctttacagtcagggtattctctgccattgctgaacaactgatgagcgcaccagctaccagcgacaatattgtgtatttcattagttacctcgttttttggttgtatcgtaaataccattaataaaagcaggtatatgtttgcaagataaataataaaggatctctcatatatgcaggatataccacaggaaaccctgagcgagaccaccaaagcggagcagtccgcgaaggtggatttgtgggaatttgatttaaccgcgattggcggtgagcgctttttcttctgtaacgaaccgaacgaaaaaggcgagccgttaacctggcaggggaggcagtacgaaccgtacccgatacaggtacaggattttgagatgaacgggaaaggcgcatctccccgcccgaacctcgttgttgccaatctctttggtctggtcacggggatggcggaggatttgcaaagtctcgtcggcgcgtcagtggtaaggcatcaggtttacagcaagtttcttgatgcggtgaatttcagtaacggcaatccggacgctgacccggagcaggaggcggtagcgcgctataacgtggagcagttgtcagaactggattcatcaactgctaccattattctggcatcaccggcagaaaccgacggttctgtggtgccggggcgtaccatgctggcggactcctgtccgtgggattaccgggatgaaaactgcggatacgacggcccgcccgtggccgatgagttcgataagcccacctcagacccgaaaaaggataaatgcagccactgcatgaaaggctgtgaaatgcgtaacaatctggtgaatgccggatttttcgcttccatcaacaaactgtcttaacaggttcccatgattaacgatgacattctggcacatgcccgacagtgtgcgcctgcggaatcgtgcggttatgtggtcagaacggcacagggagagcggtattttccgtgtgaaaatctgtctgctgaacccacgatgtattttcgtatatccccggaggattacctgaatgcccggaaccgcggcgacatcgtggcgctggtacacagccatcctgacggtaagccctgtctcagcagtgcggatcgtaccctccagatacaaagcgggctggactggtggctggtctgtgataacaggatacataaattccgctgcgtgccacacctgaccgggcggcagtttgagcatggcgtgacggactgctacacgctgtttcgtgatgcctaccatctggccgggattgatatgccggatttcgatagggaagatgactggtggagtcagggtaaaagcctctatctggatcacctggaggcggcgggattttaccgggtgaatccggaggatgcgcagcccggcgacgtgctgatttgctgttttggttcaccgacgcccaatcatgcggcgatttactgcggcaacggtgaactgttgcaccatattccggagcagttgagtaaacgagaggggtataacgacaaatggcaacgacggacacactcaatatggcggcaccggcaatggtgcgaatctgcctttacggggatttacaacgatttggaaagcgcatcagcctcagcataaagacagcggcggaaggcatacatgcgctggcgatacaactccccggattccggcagcgaatgaatgagggctggtatcaggtccggattgccgggagcgatatggcgccggatacccttactgccagactgaacgaatcgttaccgccgggggcagtggttcatattgtaccgcgtatggcgggagcgaaaaacggtatctggcaggtggtagccggggcagcgctgattggcgcgtcatttattcccggtctgaatgctgtagcggcggcagtattgttttccgcaggaaccagtatggcgctgggtggtgtggcgcagatgctgacacctgtacccaaaacaccgacggtgggtcaggcagataacgggaaacagaacacgtacttttcttccctggaaaatatggtggcccaggggaacccggtgccggtgttgtacggtgaaatgaaaatcgggtcacgggtgatatcgcagatgatgagtacccgggatgagagcacgtcgggaaaagttgtggtgatcggctccccgttacaggcaaacaccacgtcgcggcaggacggcgggattaccagaccgtctgtcgtcatccggcagtgataatcatgacaacatgagctgatacacatgaccgccattacggcggttttgttatttatggagccaggagaatgagcaaaggtggagggaaggggcatacaccacgtgaggcgaaggacgatctgaagtccacacaacaactgagcgtgattgatgccctcagtgagggaccgatagtcggcccggtgaacggtctgcagagcgtgctgattaataacacgccggtggtggacgcggacggtaacagtaatattcacggcgtgaccgtggtatatcaggtgggggagacaccacaggcaccgctggaaggttttgaggcttccggcgcggaaacggtgctgggtgtggaagtgaaacacgataatcccgttacccgtactgttgtctcagagaatgtcgaccggctacgcttcacctttggtgtacagatgctgcaggagaccacggacaagggggaccgtaacccgtcctccgtgaatctgctgatacagtttcagcgtagcgggatctggaacacagaatttgatatcactattaacggcaagatcacaacacaatatctggcatcggtagtggctgataatttaccgccgcgcccgttcagtgtccgcatggtcagggtgacaccggacagcaccaccgacaggcttcagaacaaaacgctgtggtcgtcgtatacggaaatcatcgatatccggcagggttatcctggcacagcggttgccggtctgctggtggatgcggaacagttcggcagccagcaggtcacgcgtaactaccacctgcgcggacgtatttttcaggtcccctcaaactatgacccggatacccgcacatataccggcctgtgggacggggcgtttaaaccggcgtacacgaataacccggcgtggtgcacgatggataaactgacccacccccgttacgggctgggcaggcgtatcgggggggcggatgtggataaatgggcgctgtacgccatcgcgcagtactgcgatcaaccggtgccggacggatttggcggcacggaaccccgcatgacgcttaatgcgtatattaccacccagcgtaaggcgtatgacgttctggcggatttctgctcggtgatgcgttgtatgccggtatggaatggccgcaaaatgaccttcatccaggaccgcccctccgataaagcatggacctacaccaacggtaacgtggtgggcgggcgctttaaatacagcttcagtgccctgaaagaccgccataacgcggtagaagtgagatacaccgatccgctgaatggctggcaaacctccacggagctggtggaagaccatgcctcacaggcccgttatggacgcaatctgctgaaaatggacgcgttcggctgtacctcacgtggacaggcgcaccggacggggttgtgggtgatgatgacggagctgctggaaacgcagaccgtggatttttctgtcggtgcggaaggtctgcgtcatacaccgggcgatattattgaggtctgcgacaacgattacgccggggcgtcggtcggtgggcgtatcactgacctggatatttccacccgcacgctgacgcttgaccgggaaataacactaccggaaagcggcgccaccacgctgaatattgtcgggcctgacggtaagccgttcagtacggagattcagtcgcagcccgcaccggatcgggtggtaacgaaagtcctgccggaaaccgtgcagccatacagtatctgggggctgaaactgccctccctgaagcgccgccttttccgttgcgtgcgtattaaggagaatgacgacggcacatacgctatcactgccttgcagcacgttccggaaaaagagtccatcgtggacaacggggcgcactttgacccgttaccggggaccaccaacagcattattccgcccgctgtgcagcatctgacagtcagcacggataacgacagtaccctgtatcaggccaaagcgaagtggggcacgccgcgggtggtaaaagatgtgcgttttgtggtgaggctgaccacaggcagtgggaacgagggcgatccggttcgtctggtgacaacggcgacgaccagcgaaacggagtacgccttccacgaactgccactgggtgactacacgctgacagtcagggcaataaacggttacgggcagcagggtgaaccggcgtccgtggcattcagtattcaggcaccggaagcgccatccacgattgagatgacgccgggttattttcagataacggtgacgccgcaccagactgtctacgatgccagtgtgcagtatgagttctggtactccgccacgcaactggcgactgccgccgatattcagtcaaaagcacagtatctgggcgtcgggtcattctggataaaggatggactgaaaccactgcatgatgcctggttttacgtgcgcagtgtaaatctggctggaaaatcagtatttgcggaagcatccggacgtccgggggatgacgcgaaagggtatctggatttttttaagggactgattacggagacgtatcttggtacggagttgctgaaaaaaattgacctgacggagaataacgccagcaaactgcaacaattttcgaaggagtggcaggacgctaacgataaatggagcgccacgtggggcgtcaaaatagagcagaccaaagacggcaaatattatgtggccggacttggactgagcatggaagacacgcctgacgggaagataagccagttcctggtggcggcggatcgcattgcttatattaacccggcaaacggaaacgagacgcccggattcgtcatgcagggcgaccagataatcatgaatgaggcgttcctgaaatacctgagcgcgccgaccattaccagtggcgggaatcctccggcattttccctgacgccggatggaaagctgactgcgaaaaatgcggatatcagcggccatatcaacgctgtatctggctcgtttacgggagaaatcaatgccacctccggtaagttttctggcgtgatagaagcaagagagtttgtcggtgatatctgcggctcaaaagtcatgcagggcgtgagcatcagggcgacgaacgacgaacgcagcacctcaacacggtataccgacagcgccacctatcagatagggaaaaccatcacggtgatggctaactgtgagcgtaacggtggcaccggtgccatcaccgtcacgataaatattaacggccaggtgaaaacggcggaggttatgccgtataccgcagggattccggccatgtatcagaccgtcgtcttttcggtctacaccacttcacctgtcgtggatatcagcgtctctctgagggtccgtgggcagtacaccacgtctgcttccgtctggccgctggtgatggtttcccggtcggggagcaacttcacaaactgaccggatttccggtccctttcgtttaatgaggaacaaatatgactatgtcgcgcgtaatttctctggcggcagggctttccctgtccgttttattttccactgctgccgttgccgataacggaagaggaagcggcaacagcaatattgaaaaccagacccggatttataccggcaccgaccgtgggcagaaacagcaccgcgaggcaaagggaaaaacaatcacgcggagcgtccagtgttctctgccggcatatttacgtgacccggataatcagtgctgagatgtgaatgaatctgaagcctgcctgcgggcgggcttttttatggaggcaatatgccagtacttatttccggcgtactgaaggatggtacgggaacgccggtacagaactgcaccattcagctgaaggcctgccggaccagtacgacggtggtcgtgaatacggtggcatcagaaaatccggatgacgccgggcgctacagcatggatgtggagcaggggcagtacactgtcacgctcctggtggacgggtatcccccgtcacatgccggagttattacggtttacgatgattcaaagccgggcaccctgaatgattttctgggggccatgacagaagacgacgtccgcccggaggcgctgcggcgttttgaggcgatggtggaagaagttgcccgccaggcatcggaggcatcgcggaatgccaccgccgcagggcaggcatctgaacaggcgcagacatcagcaggtcaggcatcggaaagcgccacggcagcagtgaatgcagccggagcggcagaagcatcagccacacaggcagcctcatccgcagcatctgcggagagcagcgcaggtacggcgaccacaaaagccggggaggcatcagccagcgcggcgtcggctgacacagccagaacggcggcagccgcatcggcagccgcagcgaaaacatctgaagcgaatgcagatgcctcccgtactgccgccggcgattcagctgctgccgcagccgccagcgcgacggcggcgcagacatcagcagagcgcgccggagcatccgaaaccgccgcgaagacgtcagaaacgcaggcggcttccagtgccggtgatgcaggtgcgtcagccactgcggcggcagcgtcggaaaaggcggcagccgcatcggcagccgcagcgaaaacatctgagacaaatgcagcaacgtcagcaagtacagcagcggccagcgcaacagccgcctcgtcatcagcatcggaggcatccactcacgccgccgcatctgataccagcgcatcactggcggcgcaaagcagtactgctgccggagcagcagccaccagagcagaagatgccgcaaaacgggcagaagatatcgcggacgtgatttccctggaagatgccagcctgacgaaaaaaggtatcgttaagttaagcagcgccacggacagtgacagcgaagcgctggcagccacgccaaaggcggtccatgctgtcatggacgaggtacagaccaaagcgccgctggacagtccggcactgactggtacgccaacagcaccaactccggaaaccgcagctgcaggtattgaaattgccacggcagcgtttgtggctgcgaaagtggcgcagttggttggttctgcgccggaaacgctggacacgctgaaagaactggctgacgcgctgggtaacgatccgaactttgccaccactgtactgaataaactggcgggcaagcagccgctggacgatacactgacggcgctgtcaggaaaaagcgttgacggtcttatcgaatacgttggtttacgggaaaccataaatcacgccgccgatgcattactaaaatcacagaacggtggcgatattccggaaaagccgctgtttgtacaaaatatcggagcgctccctgcatcaggtacggctgttgcagcgaacagactggcatcacgcggcgcgcttccggcactgactggtgcgacaagaggcagcgatagcggcctgataatgggcgaggtctacaacaatggctatccgacgcaatacggaaatattttacgtctgaccggaactggtgatggggaaatcctcattggctggagcgggacaaacggtgcgccagcgcccgcatatattcgcagtcatcgagataccgccgatgctgagtggtccgaatgggcgatgctctacacctcactaaatccgccaccgaattcgtatccagtaggtgcggcgatagcatggccgtctgatgctaccccagccggttacgccctgatgcaggggcaatcgtttgataaatctgcttacccgttactggctatagcgtatccgtccggcattatccctgacatgcggggctggacaataaagggtaagcccatcagtggacgtgctgtactgtcgcaagaaatggacggcaacaaatcgcacagtcacagcgccagagcgcaggatactgacttagggacaaaatctacctcatcctttgattacggcacgaaatcgaccaataccacgggcaatcatactcaccagttcggcggttatatcaattcatactggggagattccaatcacacctcatttcagcctggaggtggtgcatggacacaggccgctggcgaccatgcacatacagtttatatcggaggacatgagcacaccatgtatataggtccacacggacacgtcgttattgtggacgcagacggtaatgcggaaaccacggttaaaaacattgcatttaactacatagtgaggctggcataatgacttttaaaatgagcgaacaggcgcagacaattaaaattttcaatctgcgttcagatactaacgaatttattggtgcaggtgatgcgtatattccgccgcacacaggactaccggcaaactgtactgatatcgcccctcctgatattcccgccagtcatattgctatatttgacgctgaaacccagacatggagtttgcatgaggatcaccgcggcgagatggtttacgacacaacaaccggcaatcaggtttatatctccgctcctggtccgttgcccgaaaatgtcacatcagtttcaccaggtggtgaataccagaaatgggatggtaaggctaaggtctgggtaaaagacgaagcggctgaaaaagcagcgcagcttcgtcaggcggaagaaaccaaaagccgtcttttgcaaatggcatctgaaaaaatcgcgccattgcaggatgcagttgatcttggaatcgcaacagatgatgagaaagcgcggctcgacgaatggaaaaaatatagggtgctggtaaaccggatggatacagccgcccctgactggccggaaagaccagccagccagtaggcgttactgtggtaatgcaggccacctgattgctgtgaaggtggcctcatctgaaacacctgttaagtccagcgatttaagaacattgatataattcatcggcagaatcaaagctgctttattttcatcactgataatccccagcgttaattctatgcgccagtccttaatggcattatctgaatcgttaagtaatttctgccgggtgacttctgcctgccaaaattgaacgccgggcgttgataccggatgatctggtcatcgtggaaagcgaccctgaaaaaatcgacacttagctgtaaaatgacagtcccgccatccggtcatcataacggatttttcttctgcaccttctgaagcccgccatggcaggacgaccatgaatccgccgataaccttattgtgaaattaagaccaggaagagatgatgtctgtcggacagatactatatgtaaatttataaaggttttttgttatgccctttcatattggaagcggatgtcttcccgccatcatcagtaaccgccgcatttatcgtattgcctggtctgataccccccctgaaatgagttcctgggaaaaaatgaaggaatttttttgctcaacgcaccaggctgaagcgctggagtgcatctggacgatttgtcacccgccggccggaacgacgcgggaggatgtggtcagcagatttgaactgctcaggacgctcgcgtatgacggatgggaggaaaacattcattccggcctgcacggggaaaactacttctgtattctggatgaaggcagtcaggagatattatcagtcaccctggatgacgtcgggaactataccgtaaattgccaggggtacagtgaaacacatcacttaaccatggcaacagaaccgggagtggaacgcacagatataacttacaacctaaccagtgatattgatgctgcggcctatctggaggaattgaaacagaatccaattataaataataaaataatgaatccggtagggcagtgtgagtcattaatgactcctgtaagcaattttatgaatgaaaaagggttcgataatattcgttatcgaggtatatttatctgggataaaccaacagaggaaataccaacaaatcattttgcagtggttggaaataaagaaggaaaagactatgtgtttgatgtttcagcccatcagtttgaaaatagaggtatgagtaatctgaatggcccattaattctttcagcagatgaatgggtttgtaaatatagaatggcaacaagaaggaaacttatttattatactgattttagtaattcaagtatagcagctaatgcctatgatgcattaccacgagaattagaatcagaatctatggcagggaaagtttttgttacatcaccgagatggtttaatacctttaaaaagcaaaaatattccttaataggtaaaatgtaagcgcaccgtggaggacgtctgtcagaaccctgtcaatccggcgatgatagtgtccacttaaattttgatggacactatcacagatgacagagtccacagcccggcgcaaacacggctgtcggtcaggaaagagaaaagccagtcgctgtacgactggatacaggcgcagttgaaaacattgtcggtgcatgcggagatggcgaaggagttcggttacatgctgaagcagtgtgatgcgttgagcgtgtcctctgctgcgacggtcgggtggagatcgacaacaacatctgtgaaaacgccttacggtgcgtggcgctgggccgacgtaactatctgttcttcggctcagacagtagcggcgaggcagcggcgatcatctatagcctgctgggtacgtgcaaactaaacgacgtggagtccgaggcatggttacgcgacgtgctgtggaaaatcagcgactggtcatcgaaccgggtgcacgaactgctgccctggaacctcgaaaccgtaaaataatccttacgctacgtcctaaacgggacgcttactgagttatgagggtgaggtggttttcttgatgagcatctgaacgccggtttgtgggatagggcaggtgggacggattcgggacagtcatccgtttttaactattggcatggattggtatcttttcgcatcatgggacgtgtgagcgcaggtatgacgcggtatgttattgacttagaatgtggttccaggaactggcgcatccatacccgagcagtttccggtgtcagtgccagcgggcgacgatcgtgaatgtctaccagacctttatcggctgcggaggtaacaatcagaaatccctctgcttcatcaccgcgctcaaacggcgtactgccaatggcagccatgaatatcggcttcccgtcctttctgtgaatgaaatacggctgttttttgtcgccttccttcttccactcgaaccatctatcggcaaaacagatagcccggccatgctgccatagtggcttaaacattctgctggaggccgctgtcgcgacacgggcgttaataagtggagctttatcccaccatccgggagcgtaaccccaaatcaccgggtcgagatgtaattgctcgtcgcgttcgctcaatagcaggactttagtcccgggcgccacgttataccggcctataggctgagggtcataagcaatattacgatcggcttcgtcggccagatatgccagatattcttcacgggtctgtgcttgtgcaaagcgtccacacatatgaaaccgccagtcgtcaggctgaaagtatagggcagggggaaaatgtggcgcgctccggtaatgatttacagggaatttatacagtaattcgaaatgaaaatttgtgtattgatgaattccgaaactgagcagtgagcaaactgatgaatcaatcgcaaattgcgtcgaatctcgacggctttattccccagtttcaccccatagcttccccgtaggaaattgagccataaaaaaaacagccctgacaggctggtttttaaggggaattttggtcggcacgagaggatttgaacctccgcccccccatgttggcggtagcctgaataattatcttggtaaaggttaactatcataaaatggtacaccagtctttccaggaggaggagtgtaaaggttttggctcataaacaccgtcatagtaaagaccacaaatactgcaatcttcatttttatatttatcattgaatgctaaggtaagcttgtcatagacatcaatatttgattgccattcaggtgaggtattcattgaatcataaattaatacttttttcacttcactatcatagcctacaatgcactctgcatgtagacattccgagccaagtgaaggcctgatcaacatcagtggtccatggttttgtaattcgtaagaaataaaactctcaaagtcatcttctacagtactattgaaaacttctgcctgtaaagcttctttaatgtttgtaaaaagagaggattcaggtattttttgcacattcatttcttttaataaattctcacattctattatatcaataccctctaatatattattaaacgcttgattatcagaagtgatgtcctctaatgcactataattattgccatctctggatttgataacatttaatgagcaaacccagcaattattgtagagggtgttgcctgtggtatcaaactggctttgaaagttacgatggtgaataatctgaccctgaggagttgctgtattacttctgtaaacgctgcctaaactattttgaatgtgtcttaacataatatactcgccgaatagtaattttgttaatgtaattatatactacagtgtggatattaatacaattcttttgttgttaattattatttatgaaattaattaaaagtgaataagttagaggtgtttgttggccttaaaattacatttgttgagggggcttatatgatatgtttttattgtattgtcgcatttttcttaagctgaatccggattttggggaggtggctaaatgtaaatgacgtggtttaagataaatctatttttaataagctatctgttcaaattttcgcgatcgcttttgttggtatcactattcaagcagtttgcctgcatcggcttcaccctcacttcggcatcagggaaaatctggtgcacctgcttcgtcagttcggccagaatgatctcgctggccccttcgagtccttcaacattacgcttgtcataaaccagttctacgaacatacgtgtttcgctaataactgtttgtatatacagtatttttgctttggcggttttgtctgtcaaggcatgaaccacttgtttttaaattttggggaacatactgcgggcgtgtttgttatcgattttccctgcagggctgatggggtctggcgttgactaaaattatgtgtggggcatggatggggcaaaagtggtctgtgaagttcgttaaagttcgttaatcaagcttcatctcgatctcgctcatcccttgtttaaagcgctcctggacgatctttatcgattttaaaaactatgagtacatattataaaaatgtagcaaataggccgtttgtgcctgaaaagatgaacattctgcgtagcgcgatttgcgcaacaggaatagactggagtcgacactctacacaaagatgcgaaaggttttttatgacacaacagccacaagccaaataccgccatgactatcgcgcgccggattaccagattactgatattgacttgacctttgacctcgatgccgaaaaaaccgtggtcaccgcaataagccaggctgttcgtcatggcgcgcctgatgcgcctcttcgccttgatggggaagatttaacgctggtatctatccacgtcaacgatgcgccgtggacagcatataaagaagaagagggcgcgcttgtcatcagcgacctgccagagcgttttacgttacgcattgtcaacgagataagtccggcggcgaatacggcgctggaaggattgtaccagtcaggcgatgcgctctgtacccagtgtgaagcggagggcttccgccatattacctggtatcttgaccgcccggacgtactggcgcgatttaccaccaaaattattgccgataaaagcaaatatccgttcctgctctccaatggcaaccgtgttgcacagggcgagctggagaatggccgtcactgggttcagtggcaagatccgttcccgaaaccgtgttatctgtttgcgctggtggccggtgattttgacgtgctgcgcgatacctttaccacccgctccgggcgtgaagtcgcattagaactgtacgttgaccgtggcaatctggatcgtgcgccgtgggcaatgacctcgctgaaaaattccatgaaatgggatgaagcgcgttttgggctcgaatatgacctcgacatctatatgattgtcgcggtggatttctttaatatgggcgcgatggagaataaaggtctcaatatctttaactccaaatacgtgctggcgcgaaccgataccgcgacggataaagattatctcgatattgagcgcgtgataggccatgagtatttccacaactggaccggcaaccgcgtcacctgccgcgactggttccagttgagcctgaaagaggggctaaccgtgttccgcgatcaggagtttagctctgatttggggtcacgcgcggtgaaccgcatcagtaacgtgcgtaccatgcgcggtttacaattcgcggaagacgccagcccgatggcgcatcctatccgcccggataaagtaatcgaaatgaataacttctacaccctcaccgtttatgaaaagggcgcggaagtcattcgcatgatccacacgttgctgggtgaggaaaatttccagaaggggatgcagctttattttgagcgccatgacggcagcgccgcgacgtgtgatgacttcgtacaggcgatggaagatgcttctaatgtcgatttgtcccatttccgccgctggtacagtcagtccggcacgccgattgtaacggtaaaagatgattataatccggaaaccgagcagtacacgttgaccatcagccagcgcactccggcgacggcggatcaggcggagaagcagccgctgcatattccattcgccatcgaactgtacgataacgaaggcaacgtcattccgttgcaaaaaggcggtcacccggtcaacgccgtgctgaacgtcacgcaggcggagcagacatttaccttcgataatgtttacttccagcctgttccggccttgctgtgcgagttttcagcgccggtgaagctggaatataaatggagcgatcagcagttgacgttcctgatgcgccatgcgcgcaatgatttctcccgttgggatgcggcgcaaagcctgctggccacatacattaaactgaatgtggcgcgtcatcagcaggggcaaccgctatcgcttccggtgcatgtcgctgatgcgttccgcgcagtactgttggatgagaaaatcgatccggcgttggccgcagaaattttaacgctgccttcggccaatgaaattgcggagctgtttgaggtcattgacccgatcgccattgcgcaagttcgtgaagcgctaacgcgtacgctggcggcagaactggcggatgagttcctggctatctataacgccaatcatctggatgagtatcgtgttgatcacggcgatatcggtaagcgcacgctgcgcaatgcttgcctgcgcttcctggcgtttggcgagacggagctggctaatacgctggtcagcaaacagtatcgcgacgccaataatatgaccgatgcgctggcggccctgtctgctgctgtggcggcgcagttgccgtgccgcgatacgctgatgcaggagtatgacgataagtggcatcaggacggcctggtgatggataaatggtttatcctgcaatccacaagcccggcggaaaatgtactggaaaccgtacgcggcctgctcaaacaccgttctttcagtatgagcaacccgaaccgcatccgttcattaattggcgcgtttgctggcagcaacccggcggcgttccatgcgcaagacggtagcggataccagttcctggtcgagatgctgaccgatctgaatagccgtaacccgcaggtagcatctcgcctcattgaaccgctgattcgtctgaaacgttatgatgataagcgtcaggagaaaatgcgtgcggcgctggagcagttaaaaggactggagaatctttccggcgatctgtacgagaagataactaaagcgttagcctgacagtatccgttataaagaggtaagacatgcccggtaagcgttagcgctgccgggcatttttttgccggacgatgacgcttcctggcgaaacgtgaagtgagaatgaaggaaaacgattgctatttattgccgtaggtcaattcccttttgccttgttatcgcccataatacgcccccggtttgcacaccgggaatccaggagagttcatgtactatcccttcgttcgtaaagcccttttccagctcgatccagagcgcgctcatgaatttacatttcaacaattacgccgcattacaggtacgccgctggaagcgctggtgcgccagaaagtaccgacaaagccggttacctgcatgggacttacctttaaaaatccactggggctggctgccggtctggataaagacggggagtgcatcgacgcgttaggcgcgatggggtttggctccctggaaatcggcaccgtgacgccgcgcccacagccgggtaacgataagccgcgtctttttcgtctggtggatgctgaaggtctgatcaatcggatgggctttaataatctgggcgtcgataacctggtcgagaatgttaaaaaagcccattttgatggtattctgggaattaacatcggtaaaaataaagatacgcctgtcgaaaatggcaaagatgactacctgatttgtatggaaaaagtctatgcttatgcgggttatatcgccattaatatttcttcgccgaatacgccagggctacgtacgctccagtatggcgatgcgctggacgatctgttaactgccattaaaaataagcaaaacgatcttcaggcgatccaccataaatatgtgccggtggcagtaaagatcgcgccggatctttgtgaagaagaattgatccaggttgccgatagcctgcttcgtcataatattgatggggtgattgcgacaaataccaccctcgatcgttctctggtacaaggaatgaaaaattgccagcaaacggggggattaagtggccggccattacaattaaaaagcacagaaattattcgccgtttatcccaggagttaaagggacaattgcctattatcggcgtcggcggcattgactcagttatcgccgcgcgcgagaagatagcggcaggagctacgctggtacaaatttattccggctttatttttaaaggcccgccattgattaaagaaatcgtaacgcacatctaaactttaccctttatcagacaaccagggctttatttccggcgctggttgttttatatttctccactgttgcttatttagacattttaggcttttattattggggtaataaacgaagcggcaaaaggacaatgctgttacgagttgcttaaaagcgggagagaggtaatgcgaattaaacctgacgataactggcgctggtattatgatgaagagcacgatcgtatgatgctcgatctcgccaatggtatgctttttcgctcgcgcttctctcgtaaaatgcttacgccggacgcgttttgcccgaccggtttttgtgtggatgatgccgcgctctatttttcctttgaagaaaaatgccgggatttcgaattaaccaaagagcaacgcgcggagctggtattgaatgcgctggtggcgattcgctatctcaaaccgcagatgccgaaaagctggcattttgtagcgcatggcgaaatgtggaccccgggaacgggcgatgccgcaagcgtctggttaagcgatacggcggaacaggttaatttgctggtcgttgagccgggagaaaatgccgcgttgtgtctgctggcacagccgggcgtggtgatagcaggccgaaccatgcagcttggcgatgcgattaaaattatgaacgacaggctgaaaccgcaggttcactgtcacagtttcagccttgaacaagcggtttaattttccagtcgtaacgcggtcttaggcacgcagctacagctcagaatcgtaccatcgtcacccatagccgattttttcagcggacttacttcgccttccagcaaacgtatccggcagcaaccacagataccagcccggcaagaatacggaatacgaatcccctgattctccaactgttccagtagtacctgttgattattcccgcagaaggtttgcccctgccagtcgatggttacactcgcgtccgggtgtttctctggcgtaacgctgttgtcgaccgttgtggcgccataagcttttgccggggctgtcgccagaatctccacctcatcgccgacgcgaatgacgccgctattgcgggcaatcagattctgaccgaaatccacatcgccattgtccagggcggtacgaaaagcttgcagtgtcgccagcggttctccggaaggatgtttttgccccttttcagggctgacggtcgtaaaaatacagcggctacagggcttcacgacgtcaaaaatcacatcgccaatgcgaagcactttccagctatcttcctcccaggccgctacgccggaaaccactaagtttgggcgaaattgttccatttgtacgcctgccggacaacgctgttgcagatcgcgcagcgaggcttcgttggtcaataaatacgggtagccatcggcaaatcccagcggcaccgcgttatgtcgtttgacccggcgtgtcaactgcggcccaacccagcgcaactggacatcgcgggagaaaaagccgctcaaccattgattaatcgccgtcggggcgacgcgagcggtaaaatggtttccccagacctcggtcggcgcatcctgcggggtgaaatccgtaaagcgaaccagcgcgctactgccgtctggcgcggtcaaatgaaggccgtcgtgtaagggagagggggtaaaacgtaccatttgtggaaactggcgggcggtaataaatgtgccgtcaggctcggtcaccatgaagatgcgatcaaaagccaggccgctgatatctgccagcgcatgagtcaggccaatgccgcgcatggatttgaccggatgaataaagagccgtgataacgtcgccaccgtacagtccctcaaatgaaaataagccttcaactttatgacatgggcgtgagattagctataatgcgcaacaattttcttagcgtaaaagtgacaatatgaattctctgtttgccagtacggcccgcgggctggaagagctgttaaaaactgaactggaaaaactgggcgccgtagggtgtcaggttgttcagggtggggtccattttcagggcgacacgcggcttatttaccagagcctgatgtggagccgcctggcctcgcgtattatcctgccgatgggtgagtgcaaggtctacagcgatctcgatctttacctcggcgttcaggcgataaactggacagagatttttaatcctggcgcgacgtttgcggtgcatttcagcggcctgaacgacaccatccgtaatagtcagtatggcgcgatgaaagttaaagacgcgattgtcgatgcgtttacgcggaaaaatcttccgcgtccaaatgtggaccgcgaatcgccggacctccgtattaacgtctggctgaataaagaaactgccagcattgcgctggatctcagtggtgatggcctgcacctgcgcggttatcgcgatcgcaccgggctggcgccaattaaagagacgctggcggcagcgattgttatgcgttccggctggcaaccaggtacgccgctgctcgaccctatgtgtggttcggggacactgttgattgaggccgcgatgtgggcgaccgatcgcgcgccgggcctgcaccgtggtcactggggatttagcggctgggcacagcatgacgaaactatctggcaggaagtgaaagccgaagcgcagacccgggcgcgtaaggggctggcggagtattcctctcatttctacggttccgacagcgatgcgcgcgtcattgagcgggcgcgcagcaacgcccgtcgcgccggtatcggcgagcttatcacctttgaagtgaaagatgtggcgcaactgagtaatccattgccgaaaggcccgtatggtacggtgatcagtaacccgccttacggcgaacgtctggacagcgaaccggcgctgattgcgttgcacagcctgctgggccgtaccatgaaaaatcagtttggcggctggaacctgtcgctgttcagcgcttcgcccgatctgctgggcagcctgcaattacgtgccgacaaacagtttaaagccaagaatggcccgctggactgcgtgcagaaaaactatcatattgcggaaaccacggcggacagtaaaccggcgacggtggcggaagattacgctaatcgcctgcgtaaaaatcttaaaaagctggagaaatgggcgcgccaggaagggattgaatgctatcgcttgtatgatgccgacctgccggaatataacgtggcggtagaccgttacggcgactgggcggtgattcaggaatatgcgccgccgaaaacggtggatgcgcaaaaagcgcggcaacgtctgttcgatattattgcggcaaccttgtcagtgctcggtattccgccgaataaactggtgttaaaaacccgtgaacggcaaaaaggaaaaaaccagtatcagaaaatgagcgagaagggcgagttccttgaggtcagcgaatataatgcgcgcttatgggtaaatctgacggattatctcgacaccggtctgttcctcgatcaccgtattgcccgcagaatgctgggagaaatgagcaaaggcaaagatttcctgaatctcttttcttataccggcagcgccagcgtacatgcgggtctgggcggcgcgcgcagcaccacaacggtggatatgtcccgcacctatctggagtgggccgaacgtaatttgcgtctgaacggactgagcggccgcgcgcatcgcctgattcaggccgactgcctgggctggctgcgcgaggcgaatgaacagttcgatttgatctttatcgatccgccgacgttctctaactcaaaacgtatggaagagtcgtttgatgttcagcgcgatcatgtcgcgttaatgaaagatttaaaacgcctgctgcgtaaaggcggcaccatcatgttctcaaataataagcgcggattccgtatggatctggaagggctggcggaactggggcttaccgcacaagaaattacgcaaaaaacgctctccccggattttgcccgtaaccgtcagattcataactgctggctgatccgcgccgcctgaaaggaaaagtaaatgtcattaatcagtatgcatggcgcatggctgtcgttcagcgacgcgccgcttctcgataacgcagagttgcatatcgaagataacgaacgcgtctgtctggtggggcgtaacggcgccgggaaatccaccttgatgaagatcctcaaccgcgaacagggtctggacgatgggcgtattatttatgagcaggatctgatcgtcgcgcgtctgcaacaggacccgccccgtaatattgcgggcagcgtctatgactttgtcgccgaaggtatcgaagaacaagcggaatacctcaagcgctatcatgagatttcccgtctggtgatgaccgatcccagcgagaaaaacctcaatgaaatggcgcgcgtacaggaacagctcgatcatcataatctgtggcagctggaaaaccgtattaatgaagtgctggcgcagcttggactcgatcctaacgccgcgctgtcgtcgctctccggcggctggctgcgtaaagccgcgctgggtcgggcgctggtcagcaatccgcgcgtattgttactggatgaaccgactaaccatctggatatcgaaactatcgactggctggaagggtttctgaaaacctttaacggaacgattatttttatctctcacgatcgttcgtttattcgcaatatggcaacccgcattgtcgatctcgatcgtggcaaactggtcacctatccgggaaattacgatcaatacctgctggagaaagaagaagcgctgcgcgtagaagaattacaaaacgcggaatttgatcgcaaactggcgcaggaagaagtctggattcgccagggtatcaaggcgcgccgcacccgtaatgaagggcgcgtgcgggcgttaaaagcgatgcgtcgtgaacgcagcgagcgccgggaagtgatgggcacggcgaagatgcaggtcgaagaggcgacgcgctccggtaaaatcgtttttgagatggaaaacgtcgattaccaggtagaaggaaaacaactggtaaaagatttctccgctcaggtacagcgcggcgacaagattgcgttaattggcccgaacggctgcggtaaaaccacgctactgaaactgatgctgggacagcttcaggctgacagcgggcgcatccacgtaggaacgaagctggaagtcgcctacttcgatcagcatcgcgccgaactggatccggaaaaaaccgtgatggataaccttgcggaaggcaagcaagaggtgatggtaaacggtaagccgcgccatgtactgggctatttgcaggacttcctgtttcaccccaaacgggcgatgacacccgtccgtgcgctttccggcggcgaacgtaaccgtctgctgctggcacgactgttcctcaagccgagcaatcttttaattctcgatgaaccaacgaacgatcttgacgtcgaaacgctggaactattagaagaattaattgatggctatcagggcacggtactactggtcagccacgatcggcaatttgtcgataataccgtgacggaatgctggattttcgagggcggcggcaaaatcggacgttatatcggcggctaccatgatgcgcgtgcgcagcaagagcagcatctggcgacgaaacagccgatggcgaaaaaaaatgaggaagttattgcccctaaagcagaaattgtaaaacgtggcagtagcaaactaagctataaactgcagcgcgagctggagcagttacccggtcagcttgaagacctggaagcgaagctggaagcgctacaggcgcaggttgcggatgcggccttttttagccaaccccatgagcaaacgcaaaaagttctggccgatttaagtcaggcggagcaagaacttgagcaagccttcgaacgttgggagtatcttgaaggcctgaaaaacggggcataacgaaaggagcgcctatgtgtgaacatcaccatgctgcgaagcacatattgtgcccgcaatgtgacatgctggtggctttaccccgcctctcgcatgggcaaaaagcagcatgtccacgatgcggcgcaacgttaacgaccgagtgggacgcgccccggcagcgtcctaccgcctatgcgttagcggcactatttatgttgctgctttctaacctttttcccttcgtgaatatgaatgtcgcgggcgtcaccagcgaagtcacgcttctggaaatccccggcgtcatgttttctgaagattacgccagcctcggcacgttctttttattatttgtccaactggtgccggcattttgcctggtgaccattctattacttgtcaaccgcgccagtctgccgttgtcggtaaaaaaaacgctggcaaggatctttttcctcctcaaatcgtggggaatggcagaaatatttctcgccggggtgttggtcagttttgttaagctgatggcttacggcgatatcggcatcggcagcagctttattccctggtgcttattttgtctcgttcaactgcgggcgttccagtgtgtcgatcgccgctggttgtgggatgatatcgccccgcagcctgcactggcgcagccgttaacgccggggattaccggtatccggcagtctttgcgttcttgcgcctgctgtacggcgatcctgcctgcggagagtctcgtctgtccgcgttgccatacgaaaggctatgtccggcgtaaaaacagtttgcagtggacgctggcgttattatttacctcgatcatgctttatctgcccgccaatattttgccgattatgattaccgacttactgggctcgaaaatgccgtcgaccattctggctggcgtgattttgctgtggagcgaggggtcttatccggtggcggcggttatctttctcgccagtattatggtgccgacgctaaaaatgatcgccattgcctggctttgttgggatgcgaaaggccacggtaagcgcgacagtgaacggatgcattttatttatgaagtagtggagtttgtggggcgctggtcaatgattgatgtctttgtcattgccgtactctctgcgctggtgcgtatgggagggttaatgaatatttatcctgcgatgggtgcgttgatgtttgctttagtcgtcataatgacaatgttttctgcgatgacctttgatccgcgtctgtcgtgggatcgtgagtacgaaccaggccatgaggagtcctgatagcatggaacctaaaaaaggggaagccaaagtacaaaaggtgaaaaattggtcgcctgtctggatattcccgattgttactgcgcttatcggagcctggattctgttttatcactacagccaccagggaccggaagttaccttaatcaccaccaatgcggaaggcattgaaggcggaaaaacgacgatcaaaagtcgcagcgtggatgtcggcgtggttgaaagcgcgacgctgactgacgatctgacccacgtacaaatcaaagcgcggctccattccggtatggaaaagttgctgcataaagactcggtattttgggtggtaaaaccgcaggtggggcgtgaaggcatcagcgggcttgggacgctgctatcaggcgcgtatattgaactacaaccaggaagtaagggcagtcagccggaaagctatcagcttcttgactcaccgccgttggcgccgcccgatgccaaaggtattcgtgtgattctggacagcaaaaaggccggtcagctcagtcctggcgatcccgttctgttccggggttatcgggtaggatccgttgaaaccagctctttcgatccgcaaaaacggacaatgagttatcagttgttcattaaggcgccaaacgatcgattggtcaccagtaatgtccgattctggaaagatagcggtatcgctgtggatctgacatcggcgggaatgcgcgtggaaatgggatcgttgacgacgttgtttggcggcggcgtgagttttgatgtgccggaaggacttgagcaggggcaacccgtcgccgaaaaaacggcgtttaatctctacgacgatcaaaaaagtattcaggattcgctgtacaccgatcatatcgattacctgatgttctttaaagattcggtgcgcggattacaacccggcgcgccgctggagttccgcggtattcgtctggggacggtaagcaaagtgcctttctttgcgtctaaaatgcgccaggtatttaacgacgattaccgtattcctgtgctggtgcgcattgaaccggagcgtctgaaagcgcaattgggagaaaatgcggatgttggcgcgcatttgacggaactgcttaagcgcggtttacgcgcttcgcttaaaaccggtaacctggtgaccggggcgctgtatgtcgatctggacttttatcctaaggagccgccgattaccgggctacgcgaatttgatggttatgaaattattcccaccgtcagcagcggtctggcgcaaattcaacagcgactggtggaaacgttggataagatcaacaacctgccgttgaatccgatgattgaacaagcgaccaatacgctgtctgaaagccagcgtactatgcgtcggctgcaaaccacgctggataatatgaacaagattacctccagtcagtcgatgcagcagcttccggcggatatgcaaacgacgttacgcgaacttaaccgcagtatgcaaggcttccagcctggatcggcggcgtataacaaaatggtggcggatatgcagcgtctcgatcaggtgcttcgtgagttacaaccggtgttgaaaactctgaacgagaagagcaacgcgctggtatttgaagcgaaggataaaaaagatcctgagcctaagagggcgaaacaatgaaaaaatggctagtcgtgataatggcgttctggctggcgtcatgtagctccggcggagagaataaaagctattatcagctcccgatagcgcaaagcggtgtgcaaagcaccgcaagccagggcaaccgtctcttatgggtagagcaggtttccgtacctgactatctggcaggtaacggcgtggtgtatcaaaccagtgatgttcagtatgtgattgccaataacaatctgtgggccagcccgctggaccagcaattacgtaacacgctggtggcgaatcttagcgcccggcttcctggctgggtcgtcgcttcccagccgttgggaaccacccaggatacgttaaacgttaccgtaaccggattccatggacgctacgatggtaaggttatcgtcagcggggagtggttattaaaccacaatggacagctgattaagcggcctttccatatcgaagccagtcagcagaaagatggctatgatgagatggtcaaagtactggcaagcgcatggagtcaggaagcagccgctatcgcagatgagataaagcgccttccctgagataaaagtaatgtaaatttaaccgcttcaggtcgtgcgcctgaggcggttttttatttttgacgccggaaaaatagttgttatggctcacattttttgtacaaatgatttaccgtatagctcacaaatatgacattggtgtgaattttgcgcattgacgggcgatccatttagaggtattcgtgtagtgtgattgcacattttgtaatcactgttttcttttccaccagatacaaatatgagggaaacgaggcatgaagagacaaaaacgagatcgcctggaacgggcacatcaacgtggatatcaggccggcatcgccggacgatcaaaagaaatgtgtccctatcagacgctgaatcaacggtcatactggttgggaggttggcgacaagccatggaggacagggcggtaatggcctgattctgtctctttagaaaaagaaacctccgcagtgcggaggtttcgcctttatgggctttgcaagcatgataccgatagcgcggaatatcaattcaacacttagaacgcggaagtatcctggaacaaaccgactttcaaatcgtgtgcggtatagatcagacgaccatccaccagaacctcaccgtccgccaggcccatgatcaggcgacggtttacgatacgtttgaaatgaatacgataggtgactttcctggctgtcggcagaacctggccggtaaatttcacttcgcccacgcccagagcgcggcctttgccttcgccgcccaaccagcccaggtagaatcccaccaattgccacatagcatccagacccagacaaccgggcatcaccggatcgccgataaagtggcatccgaagaaccatagatccggattgatatccagctcggcttcgacatagcctttgtcgaaattgccgcccgtttcggtcatcttaacgacgcggtccatcatcagcatgttcggtgcagggagttgcggccctttagcgccaaacagttcaccacgaccagaggcaagaaggtcttcttttgtataggattcgcgtttatctaccatgttttatgtaaaccttattttattgaagcacgcaggatagctaacacgtgtacgctgaacaagtccgatcagttcggaataaaagcgttcagccaacgtaatggccacgggaaacgatgacggccttcctgttgcgtcgcctgcgcgatacgctcctggatagtctgcatcaacgtcgtttgaccttcgccatcccacaccagatttaacagtagcggtaaggcgtcggtcacgtcgtctaccgcccagatagtgaacttctcttctttaaccgcttgcagcagttcagatttaagactgagatggcggacattggcggcagggataatcacgccctgtttaccgtttaattcccgctgctcgcagatggcgaagaaaccttcaattttttcgtttagcccgcccaccggttgcgcgcgaccaaactgatcgaccgagccggtaatcgcaatattttgattcactggcacattggccagtgcgctgatgagcgcacataattccgccattgaggcgctatcgccatccacttcgctgtaggactgctcaaaggttaacgaggcagagaagggaatttgttgctccagctgcaactccgacatcaggaaggcctgcataatcatcattcccttagcgtggatatttccgccaagttcggccttgcgctcaatatcattaaattcgccatcgccgatatgcacaacacagctaattcgcgacggttcgccaaaggcgcgaggatgcccgggaaactcaatgacggaaagcgcattgatttgtccaacgcgttcgccttcggtttcaatcaggatctgctcttgcagaatctcatcctgcatccgttccgccagaaagccttctcgccattcgcgtcgggcaagcatcagactgagcgcttctgcgccgcaggtatcgccttcgcataaaggcgatgcctccttaaactggcgggctatccacagtgggcaaagaggcagcgtatcctgttcgccggtatagcgcacagcctcgcgtatcagagcgggccaggcatccggtgccgggggcggcaaattatcgcgtaaagcgatacgcgtcacccattgacaccacagggtcatagcttctgcgtccgctatctgtaaattgtcttcaaattcactgtagatagcctgttccgcgagctccggttccatctcctgaaaatcagccagtgattcacgttcgccaaccagaatcaccttcagtttgagcggcattgatggcacggagaccggtaatggacgcgactcgtcaaaggccacccagtcaaaacgctcgcggctaacgatggctttcagacgcatccatagtaacggctgcgccagaagggttcgtaaggaaataatcagcacgccgccgtttgcctgatgaaccagtcccggctgcagggtaatgtcgccgttatactgccgcaggcaaccaaagagctgttcggcttcgacccagtccgcgctgacgacttgtgtgacggtggcaaagttgtcttgcgcattctgcgcggcgcggtaatgaacagtatgcccggaaacgtcataatgtccgccggttaattgtccggcatcggtttgcagagcgcggacggcatctgaaagtaaagtgagatactcttgctcttcaggcgctttagtcagcataaaagaggatgatgcccacggctgtataagttgctcaagcgcaaattgcagtcgtggctgagtatcactgagtaaggtgtcgttttcgtcagtcgcgtgtggctgtgcaaatatctcctgatagctttcgctatccggaaccagatcacgccatgcaagtttcgtaatggtcaaagttgaggttttttagtctgttgtaaaaggggggattatagcctaacccgtcacgctgcacacgcggaaagcgaatgcaaagtaatatgaagacgtgtaaccattcacaggttcgagattcttttcttcagatggctaaaaaactgatattctgataacagttacacggtaacattgggatcacaatgaaatatcaacaacttgaaaatcttgaaagcggttggaaatggaaatatctggtgaaaaagcaccgcgaaggggagctgatcacccgctacgtggaagccagtgctgcccaggaagccgtcaatttgttgttggccctcgaaaatgaaccggtgcgggtaaatgtctggatagacaggcatatgaatcctgccttgcttaatcggatgaaacaaaccattcgggcaagacgcaaacgacacttcaatgcggaacatcagcatacgcgcaaaaaatctatcgatttagagtttatggtctggcagcgtctggcgggccttgcgcagcgacgcggtaaaacattatccgaaacgattgtgcaactgatagaagacgcggagcataaagagaaatatgccacgcaaatgaccacgttaaagcaggatttacaggcgttattaggcaagaagtaacgctgaaaggcgttgtcatccagaccagagcaaaaaaccccgcgacgcggggttttttatcagacggaaacttaagcctgcggctgagttaccacgtctttaacgcctttaacttcgatctctacgcgacgatccggagccaggcaatcgatcagggcagcgcgaggtttcacgttgtcacaggtgttgccggtaaccgggttagattcgcccataccacgtgcggagattttgtcagacggaatacctttggagatcaggtaatcaacaacagactgagcacgtttctcggacagaccctggttgtaagcgtcagaaccgatacggtcagtgaagcccagaacgacaacggaaccgtctttcggatccaggttgctcagctggctgtacagctgatccagagcctgctggccttccggcttcagggtagatttgttgaagttgaacagtacgtcagacttcagagtgaagtgcttggtctgtacttccggagccggagctggtgccggagctactaccggagcagcttcttgctggccgaaacggtaggaaacacctacgctcagcaggccgttgtccggacgggtgccgatggtgttggcatcaccgatgttgttagtccactggtattccagacgggttgcgatttcaggggtgatagcatactcgataccgcccgcgaataccggggaaacgccggtgtcgtggtctttagtagacgggccgccagggacgttagacttggtgtctgcacgccataccataccacccagacgggtataaacgtccagatcgtcagtgattggataacccagtttagcggtcaactgaacgccctgagctttataagcgccattgatgttgtcgcctttgtacggcatacggcctaaccagtcgtagcccatttcaaagccaacatacgggttaacctggtaaccaccaaaagcacctgcgcccagttggttttcatgagtcgggccatcattgtgaatgaagccggtgtcatggtactgagaccagcccagtttagcaccagcgtaccaggtgttatctttcggagcggcctgcgctacggtagcgaaaccagccagtgccactgcaatcgcgatagctgtctttttcattttttgcgcctcgttatcatccaaaatacgccatgaatatctccaacgagataacacggttaaatccttcaccgggggatctgctcaatagttactctaccgatatctacggcttatgctgagcacccctggcgatgtaaagtctacaacgtagttggaaacttacaagtgtgaactccgtcagacatgtgaaaaaaacatgacggatatacacatcatttaacagtttcagatgataaatcgtacagcaaaaattgcggaaaccgcttctgacaagcgttctcgcaaaaaaaacgttagcactcaaaggagatacgttcgcgtaaaaaaaagtccaggataaatcctaattttacttaatgatacaaattagagtgaatttttagcccggaatgctgtctcctgggtaaagcgtgcgcacgtacagggcgcatgataaaccctaccgcattacctaccttcgctgcttcaaccaggctggcatgttcttcttctgtcagttcttcagtcatccaaccaattaccacgctgtaatttcctgtacgcaaagcgcggatcatcgactccagcgtatgacgaggcgcaagctggctaatttgcatcactttcgttaatggcaaacctgaagactgtacccattcacggctgagcttttgctgcggcgtgagccagagctgccatcgtgattgttggcctaactgacggagtaaaggcaaaagcaggagttgcgccatcatgggctggtcttcgtggtagacaacttcactgaccagtcctgccgcggcattttccgtagcggtgcgcgcagcgttgtgggtagtggtaggaaatgacgaagaacgatttgcataacctgaagtgtacataatcaatccagccctgtgagttactgtatattcatacagtacccctgtggcgatgaaagatcaactctattttcggaaactgtctcgcaatttttattcttagtggcgtcaaaaataaaaatcatcttgctcgcggagtataagttgcctattttcgtcattaacggatccgttactgcaaattattcttttactttatgatttaaaaggaattttatgagagcactctcttatgacaggatctataaatcgcaagaatatttggcctctttggggacgatccagtatcgatctttattcggtagctatagtctgaccgtggaggataccgtctttgcgatggtggctaatggcgagctttatctccgcgcctgtgaagaaagcgtaccctactgtgtgaagcatcctcccgcctggctcatgtttatgaaatgtggacgtcccgttatgctcaactattaccgggtggatgaaagcctgtggcgcgatcagcagcagctggtgcgtttatcgaagtattctcttgacgcggcaatgaaggaaaaacacagccgtattttacagcacagactcaaagatctccccaatatgaccttccatctggaaacattgctcaatgagtcagggataaaggacgaaaatatgttacgcatactgggcgcgaaaatgtgctggctaaggttgcgacaaagcaatcccttgctgacggtgaaagttttgtatgccctggaaggcgcaattgtcggcgtacatgaagcggcgctcccggcgagtcgtcgccaggagcttgccgactgggctcattcgcttacggctgggtaattaatgtagaaatcggcggtgaaatttgccgttgcaagcgtccaatctcgggcagtaaggcaatgagcaaaccaatttgttgaacaaccagaggttctttgctgtccggacgtgtttccagtgactgaactcgctgctttaaaccctccagcgcctggtgtacgcgctgttcgtcttcaggttgatgatgaagcgcatcatcaacgtagcagaccgcgtcatccagaagccccaacacgtccggattactgagcttttcgcggtgcgcgccgagggcggagatatagctggtaaaagtgtgattgaggcaaagcagcctgaacgccgcctcccgggtttcagccgtgacgtcgggttcgctcgacatattagaaaccacggatgccagttctgcatcgcggttgtgcgcgtcgcgtctggcaatgcgataggccaggcggttatcccgtccctggtgatattgctcaaggatcgcatcaaggtagcggcaattagcatcggtggcgcgctggagtacccggggaaggttgcgaaagcgccagtccggccaaataaagctgaccgcagcccaggcgatagcgcagccaattaacgtgtcgacgacgcgcggtaacgctacctcgaagccttcgcccaggaggttaaagcagagtaataccagcagggtgatgaacatcgtcgcatgggcatactgcacattacggaatgcgaagaaaagcacgccggtaatcaccagcagaactaactgtccttcaagcgaaggaacaaaccataaaatcggcaggccgatagcaacgcctaccaacgtgccgataatcctgagcgcaaggcgatggcgggtcgcgttatagttaggctggcaaacgaacaggctggtgagcaatatccagtacccgtggcgcatcccggtaatttggatgagagcataaccgatgcacaataccagcgacatgcgtaccgcatggcgaaagagagcggactccggggtaaaattacggctcagacgcagccagatgtcgctaaacccgtgcaggctatcatcagccaactggttttctgactcattgcgcggcattgcctgggcctgctccgactcgatcgtcgctagttgcgcatcaatagcgcgtaggttggttaataagaatccaagcgtattcagcagctctaaagaagcgccgctggcgcgcatacgttcaagcgcggcgtcaatgtgggtaaagacgcgttcaaagcgcggatcatgctggtacggcgtacgcagtaagatacagcgcgccagctgcgtacaggcctgcgcctgcatcgacatcagacgctgaaagcggaacatgacgtcgctatggcgaaaataatcgcgcagcgtctggtattgaatatgcgaagaactggcgcgttcatgaatatcctgcgccacaaaatagtaatggagggtgcggcgcgtaccgcgttgaccgcgatcgccgcgcaggcgagtcaacaacgacactttcgtttggttcagcgtcgccattaactgcccgttcgctaacgctaaatcatagagcggcgcctggctttcatcttcaatatcaggatcaaacagacgtgatttcagttccagatagtgcgctaactgttcgtaactgcgtgccagattatcctgcaacggacggatcggaaatagcagatgcccggttagcgtcagtaggttataccatactgcgcctgccagcaggagcagtggttgctgataccagtgatcgtataaagaggtacccagcatcgtatagatggcaatgagtaacgcgccgaacgcgatggtggcatagcgttgccccagtcctcccaacagaataaacccgctggtggataacgttaagcccaacgcaaatagccacggccagggaaagagcagctccacagaagccgacgcgataaaaaagcaaattaaggtaatgattaaattacgcaagcgtccggcaaggcgatcgtcgagatcggttagcgccgcggcaaccataccgagcgtgagcgggatggtaagtttgacgtcgcccagccaccagggcagggcggtggtgccgcacagagcgataaaaatgcggatgtaatacagccaggtactgttccaggtataacggcgaatcaacggacttaacataaaggctatttgtcccgatcattcaaaacggcggcgcgcgttagcttctcgcgcggcgcgagcggtttctacagagacgacgcggcgaccgacaggccaaagcgcaatcgcggcaattttaaagttcgcaataccgacaggtatcccgatgatagtgacacactgcgcgataccggaggcaatgtgcatcaggcatagccaccagccgaaaaaaagtaaccagaaaatattcagcaaggtaccgccagtattcattaatacgctttttgccgccggattaagttcgtcaacgtgaatggcttcattaccgtaagggaacagggacagtttggttatctcccagcaggagcgggtcaacggcagggtaaaaataagcacaatactgaccagcgtcgccagcagccaggccagcgtagtggcaaagccgcccagtacaaagtttaaaatattcagaacggtacgcataaaccctcagttcattccggttttctatcactgcgggcaattgtaacgtttttttagactggagcacgttttctctggcggttacactgataagcacatctttacgtctggattcgctgagtcatggaactgaaagcaacttctcttggaaaacgtctggcgcaacacccgtatgatcgtgccgagatcctcaacgctggggtgaaagtgtctggcgacaggcatgaatatcttattccattcaatcagttattggcgattcactgtaagcgtgggctggtatggggcgagctggagtttgtcctgccggaggataaagtcgtgcgtttgcacggtaccgagtggtcggaaacccagcaattccatcgctatctggacgcgcactggcgtcgctggagccaggagatgagtgatgtcgccgcgcaggcattacaggagcaatgggcgcgtattagtgagcgaacgggcggaaaccaatggcttacccgtgaacgcgttcgggggctggaacacgaaattcgccagacgtttgccgccttgccgctgccggtctcacgtctggaggagtttgctcactgtcgcgagatatggcgtaagtgtctggcatggttacaggatagcgagggtagtcggcagcagcataatcaggcgtatgctgatgccatgctggaagcgcatgccgacttttttacgcagatagaatcctctccgcttaatccttcccaggccagggcggtggttaacggcgaatcatcgttactggtactggcgggcgcgggaagcggtaagacctcggtgctggtggcgcgcgcgggttggctgttggcgcgcggacaagccgatgcggggcaaattcttttactggcgtttggtcgcaaggcggcagaagagatggatgagcgtatccgcgagcgcttacatacggaagagattactgcccgtacgttccattcgctggcgctgtatattattcagcaaggcagtaaaaaagcgccggttgtcagtaagctggaaagtgacgccaccgcgcggcatcagctatttctgcgcacctggcgtcagcagtgtagcgagaaaaaagcgcaggccaaaggctggcgtcagtggctggaagaggagatgcagtgggtagtgccggaaggtaatttctgggacgatgagacattgcagcggcgtctggcccctcgcctggatcgttgggtcagtttgatgcgtatgcacggcggcgcgcaggcagaaatgatcgctggcgcgccagaggagtgccgcgagctgtttggcaaacgcattaagctgatggcgccgctgctaaaggcctggaaaagcgcgttgaaagcggaaaatgccgttgatttctccgggctgatccatcaggcaatggtgatcctcgaaaaagggcgttttatcagcccgtggaagcatattctggtcgatgaatttcaggatatttccccgcagcgggcggcgctgttagaggcgctgcgcaagcagaatagccagactacgctgtttgccgttggcgatgactggcaggcgatttaccgttttagcggggcgcagctctccttaacgacggcgtttcatcagacgttcggcgagggcgagcattgccacctggacaccacgtaccgctttaacagtcggattggcgatattgccaatcgctttgtacagcagaatccgcaccagcttaaaaaaccgttaaatagtctgaccccaggcgataaaaaagcggtgacgttattggatgaaagccagttggacgcgttactggataaattatccggctatgcgaaggaagatgaacgtatcctggtgctggcgcgctatcaccatctgaaacccgcgagtctacaaaaagcggcgactcgctggccgaagttacagatagacttcatgactatccatgccagcaaaggccaacaggccgattacgtgattcttgtcggattgcaggagggtaacgacggtttccccgccccggcgcgagaatccattatggaaagtgcgcttcttcctcaggttgaggattttccggacgctgaagagcggcgtttgttatatgtggcgttgacgcgcgcgcgtgcgcgggtctggctgctttttaataaagataatccctcgcgctttgtggaggcgcttaaacagctggatgtgccggtggcgaggaagccctaaagcgcgggcggtacagcatcccgcccgcgtagcgtttatttcaggcgctcggccagataacgcgcataatccggaataagaatatctacagcgtcattaaaatgcggggactggatgataaagtccgccgttgagacgttagtggcgacagggatattccatacggtggccagacgcagtagcgctttgacatcggggtcgtgcggtaccgcgttaagcgggtcccagaagaaaatcaacacgtcgattttcccttctgaaatgagtgcgccaacctgctggtcgccgcccatcgggccgctcagcatcgcattaacgtccataccggttgcgcgctggatcagattccccgtggtgccggttgcataaagaacgtgtttttccagcaacggctgatggcgttccacccagttcattaacatctgtttgcagtggtcgtgagcaaccaacgcgatatgtttgcgcgtcggcaaggtgcgagtcgtcagttccataattcgattccgtagttaacctgtctacagattactggaagcgcttgatgctgcaagagaaagagaaaaaaattgcgcgctgggacaactcatatcaagagggcggctgtttttccgcccattgcagaaaatgatggcgtgtctgcgggtcggccagtcggaaccaatatttcagccgctgttctgtcagagtttgtgattgcggcggtacggtatcaagctctgagacgtcggaaagtaatgtgctgtcgtctgccatcatcgtggcgaactgaggaagcgaggcgcgtttcgccgatttattataacgctcggtctctatttcataatcgaccactttagccgtagaagtaatggccagaatatcgagttttaccggaatgggcatggcgtcgccgtccaaaagcgccagacgcggcgccgcgttaaaatgcgaggcttcgcgctcgttttccagccgcgggagctggaaattgacctgacttatcagttgggtatcgaaacttatcaccagcggcggagaaatataaagccgctcttcattaccgggcaggcggatggttttttccacccggaaaacgagttgatgcggcccgttttccagttcaatgctctctgcgccgcgtaataaagagctggacacctttttgccgtccagcaccagcagatcaacctcattagacaaacggagcgttgtggcaaaaacagtcaccggcaaacagagagcaaggaaggtggctagcgcgccggttttcataaggttctcctgtccaaaggccgtctggctaataatgtatcgaaatttttcttagatcatgtttactaacatatagacatattttggcgttttgctctcatacatcggtatgggatgaatggttgctatgtcaggtttgtcgtacactttgcaaaacagccaggagaaagatgatgaaagagaccgatattgctgatgttttgacgtccactcgcactatcgcgctggtaggtgcgagcgataaacccgatcgtccaagttatcgggtaatgaaatacctgcttgaacagggctaccatgtgattccggttgcgccaaaagtcgcgggtaagacattgctggggcaacaggggtatgccacgctggcggacattcccgaaaaagtcgatatggtggatgtttttcgcaactctgaagctgcatggggcgtcgcgcaggaagctatcgccatcggcgcaaaaacgctatggctacagcttggcgtgatcaacgaacaggcggcggtgctggcgcgggatgcaggcatgaccgtggtgatggatcgctgcccggcgattgagatccctcgcctggggctggcgaaataaaagtttaaatggccggatatcgctttccggccttttaaatacaatcagttacgtagtcgcggcgcctgaagctgcttgcgaatggtacgcgccagttcatccatcgatggctgttctggatgctcgtcccgcatttcgcttcgcaactgggcctcggccagataagtatgcactggctgaccatcatcatcttccattaccacgtggtaccacggagcggcgcgaagttcgtcgttaaccgccagttcatcaggcgacggctcatcaagcgaatattccgggtcgatatcgacgaccactccgaggtaacctaacagggaatggcggacctgttggccgataccgaatttgctggctatcatagtcacctcccgggaaatagataccctttatatgaggatactattccacttttcaagttacatgacgcgacaggcaaaccctttcagatacagcccttccgggtaggtggcgatcaccgggtgatcggcggcctgacggaactgctctataaattgtacatcacgaccggcatctattgcggcatcggcaatgattttctgaaataaatcgctggtcatcagtccggagcaagagaatgtcagcagtatgccgcccggattgagcagttgaatcgctaacatgttaatgtctttatagccccggcaggcgcccattaactggcttttattttcaacgaatttgggcgggtccatgatgatgacgtcgaatttttcgccgtgttcacggtaagcgcgcagcaacttaaacacgtcgtcgcgcacgaattcggctttgctcaagtccagttggttcagttcaacgttttgcctggcgatatccagcgcatcctgtgaggtatccacgctgacaacctggcgacaaccgcccattaacgccgacacggcaaaaccgccggtataagagaagcagttcagtacccgctgattttccacgtagcggcgcgtcgccagacgactgtcgcgctgatcaagataataaccggttttgtggccgccctggatatcgaccagcaatttcataccgtgttcttcaattggcaaaagcgcaggcggcagttcgccagtgaccggaccttgcgtcagcgccatcccttcttttttccgcacggcgacgtcgctgcgatcgtaaatagcgcaatccggatagcatgtttgcagcgcgctaattaatgcggcgcgttgatattcggccccggcgctgagcagttgcagcaccaaaaaatgaccaaaacgatcgatagtgacgccaggcaggccatcggactcaccggcgatcagacgatagctatccaggccgtcttttttcgccagccagtcgcgccactgctgcgcctggcgcaggcggcgggtgaaaaacgcaatatcaatggattctgctttatcaaatgtccagacgcgcgcgcggatctgggaggctggtgaccaggcgccgcgtgctaaccactttccctgatggtcgacgatatcgatagtttcaccgaggttggctttgccttccagacgggatacggcgccggaaaagacccatgggtggcggcggagtaaagatttttctcgccctttgctgaggactaaacggggatattgcggaaatgtagattcagtcatgcggagtaacctctcacaaacagtgacgcgagccggatgatagttccagcctgggaccgtgaaaacgaaatggcgcgtagggtagcacagatgagaggggcaatcaccagcgtatggcggtgagcgtttctgcacaaaatagaatcgtaaaggcacagtttcttcagcggacgctttttatagtgttatttctttacacgaagaaggaaatacaatgaaaacagtcttctctttgaccgcagccgcaatgatggcattgagtggcggcgtatctgccgcgtcggcgtttagcctcagtagcgcggatattccggcggattttcgtttaacgcaacagcacgtctttaaaggatttggttgtagcggagaaaatatttcgccgcagctgagctggcgcaatccgcctgccggaaccaaaagctacgctattaccgtcttcgatcctgatgcgcccaccggaagcggctggtggcactggacgatggtgaatattcctgcgcagattcacgacctgccgacgggggctgataaaaaaacgttacccgccggagtggtgcagggacgtaatgatttcggttatgctggctttggcggcgcctgtccgccgccgagcgataagcctcatcgctatcagtttactgtgtgggcgctgaatacggcaacactgccgctcgacagtgagtcaagtggcgcgttggtagggtttatgctgaacgcgcatgtgattgcgaaagcaaaattcacggccacatacggaagataaaacagaggacggcacggtgcaggagatgcatattcgacatcaggatcttacgacggcagaggtgcgttccagtcatctgcaccgtttgcatcgtgttacgcttttttccgccgctatctgccatattacgcagggcagtaaagtcatcattcaggatgatagccgccttgtcgccgggcctggcgagttgattattatcccggcgaacacgccgctggagattattaatcagcctgcgcagaacggttttcgctccgacctgttattactttcaccggagattattgctcgctttaaaacgatgtacgttcaggattatccaccggcaaacctgacatcgctgtgtaccccgatgagccgtagcctgacatttatgtgggagaacgtgttggatgctgtgcgccaggggttgcccgttgggctacaggaacatcaggcgatggggttactgttagcgcttttacatgatggcgcggcgggaccactgcttattgaacggcgttacaccctcacggagcaggtgcggcaactgattatgctctcgcctgctaagctatggacagcccaggagatagcccgccgtcttgctatgggaacatcgacgttgcgtcggcgtttgcagcgtgaatcgcagagttatcgacaaattgttgaagaggtgcgcatgtcctgcgcactttctcaactgcaatcgacgacgctgccaatcggcgaaatagcgctacggtgcggctacctgtcggggtcgcgatttacggccagattccgccagcattatgggtgtctgcccagtcaggtacgttaagtatgtcctgtatgagcctccaccgttgattatgaaaggagaaccatcatgtcgaacgtctgcattatcgcctgggtttatggtcgcgttcagggagtcgggtttcgctataccacgcagcatgaggcgcagcggctggggttaaccggctatgcgaagaatatggatgacggaagcgtagaagtggtggcctgtggcgacgcggcgcaggtggaaaaactcatcaagtggctgaaagagggcgggccgcgctctgctcgtgtggacaaaatcctcactgaaccgcacagccctcgcgagacgttaacaggctttagtattcggtattaaatacattttaccggcttgggcagaccggcgattttggtcgcttgctttgccgggcctttcgggaacagacgatacagatagcggctattgcctttttcttcgccgaacttattcgccatcgcttttaccagcattcggatggcgggagaggtattaaactccaggtaaaattcgcgcacgaagcgcacgacttcccagtgttccgcagagagctcaatgccttcattggcggcgatagcgactgccagcgcttcactccactgcgtcgtctctttcagatagccttcgctatcagtactgatttctttaccttcaaagatcaacataacgtttcactgcgtaatcaacacggacggcagtgtagcaaaaaataaagccctgcataagcagggctggaagaggggaatgtcgattagtcgcggctggcgaagcccagaatgctgagcaggctgacaaagatgttgtacagcgaaacgtacagactgacggtcgcacgaatatagttggtttcaccgccgtgaatgatgttactggtttcatacaggatagcgcccgaggaaatcaggataaacaccgcgctaatcgccaggtgcaatgcaggcagttgcaggaaaatattcgccaccataccaatcagcacgacgacgatcccggccattaacataccgcccaggaaagacatatccttacgggtggtcagaacgtaagcggagcagcagaaaaatactaacgcggttccacccagcgccaggccaatgacatcgcccatgcctgctgacagataggcgttaagaatcgggcccaggatatagccgaggaagccggtaaacgcaaaagcagacaggataccgaccggcttattggcggttttataggtcaggaacatcagcccatacataccgaccagcgtcagaatcaggccgggggagggcagcatcagtaccgtactggctgtcgcggtaattgcggataaagccagcgtcaggctcaacagaaaataggtgttgcgcagtactttgtgcgtactcagtagcgagctacgatcacgcgatgatgtaatgatacgatccattagtcactctcttatgacagatgtaattaataaaggagaataataaaaacagtcactgtcacccagtggttttacccatctttacgcattcgtttacgtttagtttccttaagagatttcaggtgattaccgtcgttaaaacggtctgctcatgcctggcgctacgccataaaacaggcggcagcgccaaccacgcgttaccgataaaaaaatcgctaatcacagcggtgaaacagtggaggcgatcaatacgtattcagccagttttgtgttgaagaaatggtcaatgtgccgctatttcaggcaattaacgaaattttgcctgtttttcacgcaaacgaacacattcggtctttacatggcgcaccgggatgtttatagtgcgcctcattccggaagtgtggccgagcggttgaaggcaccggtcttgaaaaccggcgacccgaaagggttccagagttcgaatctctgcgcttccgccagattaaacaaggggttaccgaaaggtagcccctttgtttttttaggcgctatagaatatagttagaaaatactgttagaatatttcccgaaaaaacggactacgcgagtctttagtttcttttcgtttcccgatgtgtctatttattgaagatgtagaccattctgggaggtgaaggatgccccatctctttcagaataatgttggtatattcgacaacagggcctcttggatgattttcttctttatcctgaagatgggtcagggcatgtacaacttcatgaataaatgaacgttttgtgtcaaaaagttgtcttccttcgttactttcataatgttcggtatatgaatcatcagaatcgtccagattgagacaaataactttcctgccttctgaaagtttgaagtgttcctgagccacggtagtttcaaaggcttcgcctgcccccagtagccagcgctgctccacatcatgtagttctttttcatatgcgtaattcatcagtctgcggaatgtttcgctttgggtatacgcattttgaagtacggaggatagttcatcgtagcattcgtcataagtgtcgtcatcaatttctgtatcagggtctattccacccgcgcctgagataaggtactccaccacacactctggctccagacggaattcactgtttatggcaaggctgtcatgagcaaggcgtagccgtgaggggtttggtgcatgttcgggaatatcggggaaaacaggtgtatctgcggtatttaatctatatgtggatactccgctttgaggtattaatctgtaggtgaccggaagcataacttcttatttcctgactacaattatgaattatttaaattaaacaataatagtgtttttagttaatgtgccacatacaggtaacgctatgattcagacaaagccaacaagtaatacgctgaaaatgttatttataatgaaacttaggggcggggtttatttaataaaacaagggggcctctgtttgaatacttcttgtttataaaatccctttatctcgactaaaatatcggatgggggaaaagagttctatcattgtaatccgggagtggagtaggggtatgttgactacctgtcagatcggctcctgttaatgctttcgctaaagttagagctatcttatctaatttcgcaccatttagtttggtgtcagttaagtctgagccgaatagaattgcagcggttaagtttacaccggacatgttagcgcaagtcaggtctgcgtgagtcaggtttgctttagtcatgtttgaacccattagatttacagcgtgtagatttgcacaacacaaatttgcaccgactaaatttacattagatagagttgtttcacggaaatctgcattagaagcatctatttttgacaaatcttccccctggaaatctttatgagccaggtttactccgcgcaggttcagaaaaccatcctcggttataagtgaatcaggctgttgtatattatgtttactcatcagttttaacattcgacatacattccaaaatctctcactatcaactttatccgttacagtttttccatttttgttcacttcaataatgaccatgggatccgtattttcggatgctgctccacatgacagacatatagtacacccgttgacatcctccagaaatattttattaccatcgaagaaagcatttttatttacatataataatgatgtggtcagttttccaattacctcccgaaaccatctttcattgcttcttcttactccaccacaggtaaaaaaattgacaaaccattccagtataccgcgtggtgaagttgcacttttcattgcttctttcgtaccggtaccggccgcatgcaaatatcttaatatattttctggggacgcgttagttattggcattttgattccttcttatggaagtgagccgactccttataggtgtgagtcaagtcacatttatacaaggaataataaaaaaagatataaggtgatttttgtatttagagctttggttgagtatgagtaggtgtctggcatctgacaagaggcgatgatatctgccataacggtgaagcagaagtaatatcacccgtgaataataagattatccttgctattgacttccttcatttccagcatagcttacgcttcatcatcattgaataaacaattaagtttgttgagcgaaaatttacttaaagaaaaaataataagcaccaatattttttgcagtatttcaacttataccagaataaatgcgcgtagatggcgtaaaaacctgatgagcaggaatacttacacactaaaaatgctcccgcaaacagagcaaaatgagagagatgaacgtttgccccttacatttccaccaaagattctggtcttgtctcttgtaaagggcatacgtatcgcgttttatctcattaagaaagtatgttgacgtattaaattatgcataatgctctttcaattgcttcacgtttgaaatgaataattcaaaaccagtgagcgcctcttcttcggtactggtttgcggcaagcgataaagcgccactaaagcagtattgtctgcgtcagcgccgatagtgacggcgctggtgtagttcagacgtaaaaaatgctgcaaagtcaggatgtcgtcaggcaatggcataaagggacagcacatttccagtgtatgatcggattcattaaaataaacctgtatcccatcatcaatgataagcagtggctcatcttctggcgcatccaggcctaacgcgtcatataaacgatttaatagactttccatatagttacctcaagactcaagatgtgattaatgaagaaatgccttttactgactgccaaatattttcatccccaactcgtttttgataggaaagattgagcacctctggcgataaatttttcattactttgtttcccgccccgcccgtattttgtttctgaatctccaggttaccgctattcagtaatactttttggaaaattttctgtccaccgctatccggaagactaccaggcgcacttaacatatgggtctgatgtaaggaaatgatctctcgcttgatttctgaatccatcatccctgtacgatctttgccgcttttacaattccaggcgggtaccgcgtcaatttcatgggctaacatggcaaggcgttgtgcgagtttatagggttcgccgccatctttatgatgttggttatttttccatatatccttaatctggcgcgctaatgtattgacgacctcataattatccgggtattgcgccagccattcgccaacccagccacctggtctggcttcagggcgtaaatcattgcctaataactgatgtagcgcctcggcattatagctatccgatgccttaaggccaaagccgagcttgagcgccagctcattaacacccacattaaatgcggcgacgtccggttttatttttaccgtctgtagatcgccatctttattgcggatttttaaatgaatcatttttcccggctgggtcaacgattgccatgcgcgcatttggtcctcgaccatcgttccctctttgccgaaaatattcgacgcggtgagtaacccgacggataccagtttcaggcttaccgcctcgcccgctaaggctttgttaagcaactcaggtttactaaaaagtgccgcagttaatacttctttggctttgttttcagcgccgacgtgacgcagaagcggatctttttcatgatagggggaaagcacgccatgacgtatcccgcaaaaaagcgttttatctttaccgtcctcatgcacactcaccgtggacatccacaaattattggcgtgatgaatattcttggtatcccaactgcatacgccctttccctcataagcactgggaaagatatcttttgcgccgattttcatctctgctgcagggagctgcgtgttggtatagtgatgcccgttatgcgtgagtgtattttttatggtttgccagggctggttattaagctgcttgacctgagcatctctaaacgctactgccgcaaagcgatgagcttcttttgcaggtaagccatcctgctgctgagtgcgtgctgcaataagttcgataagatttttcttcaatgcttttgccgcggcttcttcttgttttgttgctggccggtccgctttaactttggctaactccatttggtttgccattgacgttagaaccgggtcttgtttacccagaacggttgccgcgacggtaagaagatcgcgctgtaagttatagaggttatgcagcgagtggttagacgccttctgatgctgtagataattcccccatgtcgcgccgggttctcgcaggacaataatttccgggcgagcgtcgggcgctttagccggcgctttgccctggcctgagagaatctgcattccgttgtataaggttttttgtaggcttttaaaagcctcctgggtttttagtgaagctgagtgatagaagctctgtatttgcatagcgtttttaatattcctgaataggggagtgggaacattcaacagggttaacaaccctttaaaaggatgtgacttttatgcaccaggaactttaaaaaaatgtcctttttaatgaggaaacgcttctgatcaggcggggaggcatcctgacgtccatacgtagtggcgatcatgggggagatcggtacatcaaatgttcataaaatctacaaacttcacaatttatggcacaacttttattgaaaacccaccttcttgactcagatcaaattcaccgatttactcctgcgtaaagtaacggcgttacatcaaatgttatacaggtgtgtgtatgccagcaaagccccggacaagtaagaccgtgacgaagaatattcgtttttcctattccatgcttgaacagatagaattcgcgttgaaatctgaaaagacgcggaatttttcagcatgggtaaaagaggcctgtcgggaaaagttatgtaacacgggacataagctgtagttatcgtcttatgtaagagggggcggccattttgaaaagaacaacgtgcttatatacctcctgggtttttgccgcttttgtctctctgctgatatttgcctggagtgtcataaactatcctctctatgaatccataataattattgtcttttatatctggctaattctggtaccgctttatcttattgtgtatgagtggctaatagattgtcattaaatttatggctgcgtacttgaaaagtgatatttcatatctgtacggtaagtcattgtcgtaataatattattggtcaggcgacgggcgagcgtctgcgcattttgcatcgttttatcttcaaaattttgcagtaagcgttgcgcttctttcggatgcgacgcatataatctcagatagctctgctccatcttatactgctgcttagctgtttgctgttcaaatgttttccaggcgtgttgcacatctggcgcaaacgcattgtagtcctgcataaccagcgtttgcagcgtgcggaatgtccagtaggtagagtcgttgctcgcccgatcggttcctttatcatctccgggttgataatgacgcatcccctgataataggggagatagacgctaagagatggcattccataggcgatgtattctacgttgccgatagcctgcggtaatttcggtctgacctgtaaaatatgtgactcctgggtacgaaaaacggatataggtcgccatggttcttgtggattatgactggcataagggtcgtgcgacgttccctgatagtgattgcgtagcgcgttttttactgccgccacgctgatcttcgttattggcgttaaaaaaacaggaaatgtttccccttcgctaacgaccgtatccagatgcggattaaactggtgttgtagcgtccagacgcgcggataattataggtggtatcgtttttgttatcctgcgaataggcttgatgaaagtcgaattcgccgcgggccggatcatataatccctgctttttcgcaaagcttactaacgttggtgacgccatataattcgcgttatcattcggatcgtaatggcgtaaacgtccctgattggcggaaacgaaatagctatctgccggaagtcgtactgccagccattgatgaccgcttcccgtctccagataccatatctctttgctatcaataaacgcgacgccgaaaccttcgcccgcgcctttttgttcaataatatctcccagtaatttggcgccctgacgcgccgattgcgccactggcaggatcacggactcaatggcgtcttccgtgattcccgtttttgtcacgtaaggatcggcagccagcgccgctctgccgttataaatggtttccgttgcgctcattccgacgcccgccgaattgaaaccggcttcacccatggcgttatcgttagtatcaaagtcatgaatcgccgtatagcgcatcgctgtctccggaagcggccagctaaaattgttccgatgtgctttatactcgccttgttgatgaaacgcgatgggatgaataaccttatgcttggcgttatttgccgagccatcttcgttgcgcgcgataatgaaggagccgtcagccgaagcctgattgcctaccaaaagggtagtacaggcgatgactttacccatacccagcagcgtaacggcgaatgcaagatactttttcataaaggttcccactgaataacgcattatgggatgaattgaccctggattggaaaccgagaaagtgatcgagccagcaatattctttgccggcatcctttattttctctttattgaggttgtattgataaccacagccctgtggcagggaaggggaacagaacctgtcctgaccttagctatcaccactatcaggcagacgaaccgaaaagatattatgttcatcggcatagcggtaagatgccgagccaccgtgtaatagagcaatcgcgttaactaacgataaccccaggccgaaaccggcagtgtggcgggcattatctcctcgccaaaaacgccggaaaagcttatccgcatcggcggggtggctgcctggattagcgacccgaatttctgcaacgttatcatcataagcgctttcaatacgtatcacggcgttttcatcagaataacggatggcattcgtcagcaggtttgagagcactctttgtaataatatttcgtcagcccataccgttccctgacattgatttataaaacagatgcgcttctcctcggcaagggggctaagataatccagcatattttcgaccagcgcattgagcgaaacaggctgtttttttaccgctatattctggtgctccgcgcgtgccagaaagagaatattttctgtcagtcgcgacagtccctccagctcttcaatattatcgacaagggcttgttgatactcttcggcgctgcgttcctgactcagcatcacctgattcttccccagtaaaatattaaccggcgtgcgcagctcatgcgccagatcgtcggcaaattggttcaggcgttcaaaatcgtcggaaagcttctggcgcatggtatttagcgcttgtccaagcggcctgagctcaacgggtaacgcctgttccgccaacggctggcgaagtgtgccgctatctgtcgccgcggtgagtcggctgagcgacgtaatggcccgcagcccgtttctgatgactaatggactgagcgccgaacagacgaggatcgcgataaggctcatcagcaaactgttgcggcgatattgcgccagcatttgccgcctttccgtcgccagcctggcaatagtaagggtcagcgggtcatcgccgcttctggcgcttacgcgtaccgcggtcagttccgtgccttgtaccgcctggcgaaataaggtttcgcgggtgatgtttttagtcagcggaatctcgttaaagcgttggtcggggatgccgctatgattaatcgcaacattgtggcctgttgctgaatggatcaataagatgtcctgcttcgtatccaccatccgattgaaatagagcggcagattttccggcctggcgccatccagtaacagttgctgcatttgcgccgcccgatttattagcgtcatatcatcccgatacgttaattctttgctcagcgcgttatagagcgtccagctaatgccggtacaggcgaggataaggatggcgataaaagaaattgtcaggcgcagcgtcattgataacttaaccattctgcgacgtttccgcctgtaatcgataacccatcccccggacggtcataatgagcttcttttcaaatggatcgtctactttggcgcgcagccgacgaatcgcgacatcaacggtgttggtttcactatcaaagttaattccccaaacttcgctggcgatcgcggttcggggcacgatttctcctgcccgggacgccagtaaccagaggagcaggaattctttgcgggtcagggaaatcggtttgccatttcgtgacactgattgctttgtggcatccatgtccagaccattgatcgtcagtcgagtaaaggcagggacatgctgtctgagttgagctctcacccgggccagcagttcggcgaaggaaaaaggcttaacaaggtaatcattagcgcccgcctcaagacctttgacgcgatcctcaaccgagtcgcgcgccgtcaggcaaataacaggggactgatgcgcagtgcgtaacgcgcgtaaaacctgccatccatcaagccccggcagcataatatcaagaataatcaatgaataatgttcctgaagggccaggtgtaatccgtctcgtccatcacaggcataatcaaccacatagcctgcttccgtgagtccctgacgtacccactcaatggttttctggttatcttcaatcaataaaatcttcatcaacgcagtatgccataggcttgttagcgaatccgtaaatctccaacaagatgacataattgtcatgtccgtgtaaggttaatcctggacgcgccagatatattttcctgcatcaataccgtaaaggagtgaagcatgaaacgatatatactggctaccgtgatagcatctcttgttgcagccccggcaatggcgctggccgctggcaacaatattctcagcgtacatattctcgatcagcaaacaggtaaaccggcgcccggcgtggaggtggtactggagcagaaaaaggataacggatggacgcaattaaacaccgggcataccgaccaggatggacgtattaaagcactgtggcccgaaaaagctgccgcgccgggggattatcgcgttatttttaaaaccggccagtattttgaaagtaaaaaactggatacgtttttcccggagattcccgtcgagtttcatatcagcaaaacgaatgaacactatcatgtgccgctgttattaagtcagtatggttattcaacctatcgcgggagctaatttagagcctatcccattagggttattttacttgccattttggtcctgggcagtgctcgccaaaacgcgttagcgttttgaacgccgcttgcggcggcccgaagggcgagcgtagcgagtcaaacctcacgtactacgtgtacgctccggtttttgcgcgctgtccgtgtccaaactggctgcgccaataacgcctggtgggataggctcttagattgtattaatcgccgcgatttatggcgagcaaacatcgcggcgggaataaaaatcttcagcgtatcgactcttctcccacaagcggtggttatcccgcttgtgggcatgagtgacggttaaacaggcgcttccatctcaagtctgaccggatgaaaacggcgtttgaaataaatcaggccatgcccatcctggctaagaataatatttttgatcgccaccagatacaccagatgcgtgccaatggtttgtacctcgctgatctcgccttcaagaccggccagcgcgccgttaagtaccggctggcccagcggcccgttttgccaacatggctggtgaaaacgctcttccatcgccatccccgtcataccggcaaagtggcgcgccatcagctcctgctcatggttaagtacattaatgcacagcctgccgttaccctgaaaaacggggttcatggcgctattggcattaatacataccattacggagggcggcgtatcggtgacggaacagaccgctgttgcggtgataccgcagcgtccggcgtgacccgccgtggttacgatgttgaccgctgccgccagacttgccatcgcatcgcgaaaacgcagacgttgttcatctacttgcatgagaacctcctgccgcgttatttcagcagcttatccagttgattgatgtcgtcgttattgtgcaaatgcgaaaccgtccagccattctgatcgtattcggagaggcagcgatcaaccattgccatcatcttatccatattgccggagctctgggcctgacgcaggcactgcagacgaatttcatcctggctgcccgagtagttaatctcgtacagctcatggcgaccgccaaactcgctgccgatggcatcccacatcaatttaagaattttgatacgttcaacatggtccattccgttagagccgcgtacgtatttcgctaggtactggtcgatttgcggattattcagatcgcgggcgctggaaggcaggtaaatcaggccgctggtaacgttacgttcaataatatttttaattttcgcgtaggccattggggccatcacacgataggtttgcagcgcggcgtggtccggtagccaggcgccgtttacccacggggttgcttcggaacacatagaatcgctcaatgcccagaacatattgcgccaggccacgacttcgccgagatcggcctgcacgccccggaactctacggtacccgtacattcgagcgattttttcagcagcgcggtaatgaaatcaagtttaaccgccagacgaacacaggcttgcagtggatacatacgggcaaagccgccttccatcgtccagcgacggcaacgatcgaaatcacggtaaattaatacgttttcccacgggatcagcaccttgtccatcaccagaatggcatcgttttcatcaaagcggctggagagtggataatcaaacggcgagcccgtcgcgcccgcgaccatttcatacgaggcgcgcgaaataagttttacgccttcggcatccattggcgcgacaaacatcagagcaaaatccgggttttcgcccatcacctgggctgagccgaaaccaatcatgttgtagtgagtcagggcggagttagtggcgacgactttcgccccgctgacaataatcccggcgtccgtctctttctccagcttgatatagacgtctttcacttcgtcggcaggtttgtggcgatcaatgggcgggttgacgatagcatggttaaagtacaggccggtctcctgaatacgggtgtaccagttacgggcgttctgctcaaactggccgtagaaggctgggttagcgcccagagcgcagccaaaggcggctttgtaatccggtgtgcgtcccatccagccgtaactcaggcgtgaccactcggcgatagcatcacgctgttggcgcagatcgtctgcgcttttcgccacgcggaaaaatttatgcgtataaccgccgctgccggtatcggtattccagcatagggtatcttgcatcgacggtttatgtaatgcgtcatacagttgtgcgacagaggctgcggcattgcggaatgccggatgtgtcgtaacatctttaacgcgttcgccgtaaatataaatttcccgcccgtcctgcaggctttttaaatactcttcgcccgttaacggacgcttgttatcagtacgaaaatcttcaggtttcattgcggcctcttcctcgttaatcggaatgttttgttaataatatgtttcttatttgttgttcaattgaataggcagaagcgtaaactgtgaagagactttcaggacaacggcgggtacttttcagatgaacgtcgaagaagaagagtaaaatgcgatcgccgtcaacgttgtaagcgggaggggattcccgtgtcggcggcgtgggaaggtaagaatactatgcttccgcttcgctatcaggatgctggcgtcccagagcaataagatcgtccagcagcagcatcaattgctgtgttttttcgggcgtgaaatcggcctcaatttttcgataagcctcttctacctggcttcgggcacgggcgtacaacgtttgtccctgctccgtcaacatgacatataacttacgctgatcgttaaccggcttgagtcgcaacaccagtccgtctcgctccatgcgcgtcaatattccggtcagacttggacgcaaaatgcaggtacgaaaggccagctcgtgaaaatccatagaggggctatcggccaggattcgcacaatgcgccattgctggtcggtcagattgtggcttttaacgatggggcggaaataggtcattgccgcttcgcgcgcctgaagcaatgcgatggttaatgaatcatgcataagcgtttctcttttgcagaattattaatacctgaataatcgtgtttaccgatgtgagctatgacatctgttttatgtccaaagtttaacagaaacaaggggctttatttaactatttgatatgtatgtgtttaataataaatttgtgaaaatattgttaatcacatcacaaatgctttacttcagcttgctaaatgtacagcgaaagcataaatctaatcattaatatattaatgaaatcacagcccgttaaatcggcctgaggagtttatgtatgaagggtactgttttcgccgttgcgttaaaccatcgcagccagcttgatgcctggcgagaggctttctctcagcctccctataatgcgccgcctaaaaccgcagtgtggttcatcaagccgcgtaatacggtgattcgtcacggcgaacccattccttatccgcagggagaaaaggtactgagcggcgcgacagtggcgctcattgtggggaaaaccgccagccggatacgccctgaagcggcggcggactatatcgccgggtatgcgctggctaacgaggtcagcctgccggaagagagcttttatcgcccggcgattaaagcgaaatgtcgcgatggcttttgcccgctgggtgaaatggcgccgctgagtgatgtggataacctcaccattatcacggaaatcaacggacgagaagcggaccactggaatactgccgatttacagcgtagcgccgcacaactgcttagcgcgttaagtgagttcgctacgcttaaccctggcgatgcgatcttactcggtacgccgcagaatcgcgttgcgctgcgtcccggcgatcgggtgcgtattctggcgaaaggtttacccgctctggaaaatccggttgtcgcagaagatgaattcgcccgccaccagacttttacgtggccgctgtcagcgacgggtacgttatttgcgttggggttgaactacgccgatcacgccagcgagctggcatttacgccgccgaaagagccgctggtatttatcaaagcgccaaacacctttaccgaacatcaccaaacgtcggtgcgcccgaacaacgtcgaatatatgcactacgaagccgagctggtcgtggtgattggcaaaacggcgcgtaaggtgagcgaagccgaagccatggagtatgtggccggttacaccgtctgtaacgactacgcgatccgcgactatctggaaaactactaccgtccgaatctgcgggtaaaaagccgcgacggcctgacgccgataggcccgtggattgtggataaagaggcggtttctgatccgcacaacctgacgttacgcacctttgtcaacggtgagctgcggcaggaagggacgaccgccgatctgatcttcagcatcccgttcctgatttcttatctgagcgaatttatgacgttgcaaccgggcgacatgattgccaccggtacgccgaaagggctgtccgatgtggtgccgggggatgaagttgtcgtggaagtagaaggcgtgggccgcctggttaaccggatcgtcagtgaggagagcgcaaaatgaagaaaataaatcattggattaacggcaaaaatgttgcaggtaacgactacttccagaccactaacccggcgaccggtgacgtgctggcggaagtggcctccggcggtgaagcagaggtgaaccaagctgtcgcggcggcaaaagaggcgttcccgaaatgggccaacctgccgatgaaagagcgcgcgcgcctgatgcgccgccttggcgacctgattgaccagcatgtgccggaaatcgcggcgatggaaaccgccgacaccggcctgcctattcaccagactaaaaacgtgctgatcccgcgcgcctcgcataacttcgaattcttcgccgaagtgtgccagcagatgaacggcaagacctatcctgttgacgataaaatgctcaattatacgctggtgcagcccgtcggcgtctgcgcgctggtgtcgccgtggaacgtgccgtttatgaccgcgacctggaaagtcgcgccgtgcctggcgctgggcaacaccgcggtgctcaaaatgtccgagctgtcgccgctgactgccgacaggctgggcgagctggcgctggaggcaggaattccggcaggcgtgctgaacgtggtgcagggctatggcgcgacggcgggcgatgcgctggtacgccaccatgacgtgcgtgcggtgtcgtttaccggcggtaccgccaccggtcgcaatatcatgaaaaatgccgggctgaaaaaatactcgatggagctgggcggcaaatcgccggtgctgatttttgaagatgccgacattgagcgcgcgctggacgccgcgctgttcaccatcttctcgatcaacggcgaacgctgcaccgccgggtcgcgcatctttatccagcagagcatttaccctgagttcgtgaagcgctttgccgaacgcgcgaatcgcctgcgtgtcggcgatccgaccgacccgaacacccaggtcggcgcgctgattagccaacagcactgggaaaaagtctccggttatattcgcctcggcattgaagagggcgcaacgctgctggcgggcggtgcggaaaaacccactgacctgcctgcgcatctgaaaggcggtaacttcctgcgcccaaccgtgctggccgatgtcgacaaccgtatgcgcgtcgcgcaggaagagatctttgggccagtcgcctgtctgctgccattcaaagacgaagcggaagggttacgtttggcgaacgacgtggaatacggtctggcctcttatatctggacccaggacgtgagcaaagtgttgcgcctggcgcgtgggattgaagccggcatggtcttcgtcaacacccagaacgtccgcgacctgcgccagccgttcggcggcgtgaaagcctccggtaccgggcgcgaaggcggcgaatatagcttcgaagtgtttgcggaaatgaaaaacgtctgcatctcaatgggcgaccatcctatcccaaaatggggagtttgatatgggcaagttagcgttagcagcaaaaattacccacgtgccgtcgatgtatctttctgaactgccgggaaaaaatcacggttgtcgtcaggcagccattgatgggcatattgaaattggcaagcgttgccgcgaaatgggcgttgacaccattatcgtattcgacacccactggctggtgaatagcgcttaccacattaattgtgccgaccatttccagggcgtctataccagcaacgaattgccacactttattcgcgacatgacctatgactatgacggcaatccggagctcggccacctgattgccgacgaggcagtcaaactgggcgtgcgcgctaaagcgcataacatcccgagcctgaagctggagtatggcacgctggtaccgatgcgctacatgaacagcgacaagcacttcaaagtggtctccatctcggcgttctgcactgtgcatgattttgccgacagccgcagactgggcgaagccattctcaaggcgattgagaaatatgacggtaccgtagcggtattcgccagtggttctctgtcgcaccgttttattgacgaccaacgggcggaagaagggatgaacagctacacccgcgagttcgatcatcaaatggatgagcgcgtggtcaagctgtggcgcgaaggcaaattcaaggagttttgcaccatgttgccggagtacgccgactactgctacggcgaaggcaacatgcacgacacggtcatgctactgggaatgctggggtgggacaaatacgacggcaaggtggagttcatcaccgacctgttcgccagctccggtaccggccaggtaaacgctgttttcccgctgcctgcgtaaggggtgtttatgccgcactttattgctgaatgtactgaaaatattcgcgagcaggctgatttacccggcctgttcagcaaggtaaacgaggcgctggccgccagcgggattttccccatcggcggtatccgcagtcgcgcccactggctggatacctggcagatggctgacggtaagcatgattacgcgtttgtgcatatgacgctgaaaatcggcgccgggcgcagcctggagagccgtcaggaagttggcgaaatgctgtttgggctgattaaagcccacttcgccgacctgatggagaaccgctatctggcgctgtcgtttgagattgccgagctacatccgacgctcaattacaaacaaaacaacgtacacgcgttatttaaatagcacactctttcgcccggtggcgctgcgcttaccgggcctacaaaaaaacgatgcacgaagcaataccgaaccgtaggccgggtaagacgcacccgcgtcgccacccggcacagcagcaccgaatgacgtaacaggaaacactatgctcgataaacagacccataccctgatcgcccagcgacttaatcaggctgaaaaacagcgcgaacagattcgcgcagtgtcgctggattatcccaacatcactattgaagatgcctatgccgtacagcgtgaatgggtcaatatcaagattgccgaagggcgcacgctcaaaggccacaaaatcggcctgacctcaaaagcgatgcaggccagctcgcaaatcagcgaaccggattacggcgcgctgcttgacgatatgttcttccatgacggcggcgatatccccaccgaccgttttatcgtcccgcgtattgaagtggagctggcgttcgtgctggcgaaaccgctgcgcggccctcactgcacgctgttcgacgtctacaacgccacggattatgtgattccggcgctggaactgattgacgcccgcagccacaacatcgacccggaaacccagcgtccgcgcaaagtgttcgacaccatttccgacaacgccgccaacgccggggtgatcctcggtggtcgtcccatcaaaccagacgagctggatctgcgctggatctccgcgctgctctatcgcaacggcgtgatcgaagaaaccggcgtcgccgcaggcgtgctgaatcatccggccaacggcgtggcgtggctggcgaacaagcttgccccctacgatgtccagcttgaagccgggcagatcatcctcggcggctcgttcacccgcccggtgccggcgcgcaagggcgacaccttccatgtcgattacggcaacatgggcgcgatcagttgccggtttgtgtaaggaaaaaacgatgaaaaatgctttcaaagacgcgttaaaagcggggcgtccgcaaatcggtttgtggctggggcttgccaacagttacagcgctgaactgttagcgggcgccggcttcgactggctactgatcgacggtgaacacgcgccaaacaacgtgcagacggtgttgacccagttgcaggcgattgcgccttatcccagccagccggtggtgcgtccgtcatggaacgatccggtacagattaagcaactgctcgacgtcggcgcgcaaacgctgctgataccgatggtgcagaatgccgatgaagcgcgaaacgccgtggcggctacgcgttatccgcctgccggtattcgcggcgtgggcagcgcgctggcgcgggcatcgcgctggaaccgcattccggagtatctccacctggccaacgacgccatgtgcgtactggtgcagattgaaacgcgtgaggcgatgagcaatctggcgtcaattctcgacgtggatggcattgacggcgtgtttattggtccggcggacctcagcgccgatatgggctttgccggcaatccgcagcacccggaagtgcaggcggcgattgagaacgccatcgtgcagatacgcgcggcggggaaagcgccggggattctgatggccaatgaagcactggcgaaacgttatctggaactgggggcgctatttgtcgccgtcggcgttgacactacgctgctggcgcgcggagcggaggcgctggcggcgcgctttggcgtagaaaaaaaactgtccggtgcgtccggcgtctattaagcctggccccgtaagcgcagcgctaccgggcaaccgtagtaccctacaaaattcccatcagaggaaaaaaaatgagcgacacatcatctgcacttccggaaagccccgagtctgtcagttcgcacaacgcgctcagcacgggtcaacaaaccgtcataaataaactgttccgccgactgatcgtatttttattcgtgttgtttatcttctcgtttttagaccgtatcaacatcggttttgccgggttgacgatggggcaggatctggggttaagcgccaccatgtttggtcttgccacgacgctgttttacgctacctacgtcattttcggcattcccagcaacgtgatgttgagcatcgtcggcgcccgccactggattgcgaccattatggtgctatggggcattgcatctaccgccacgatgttcgcggtgggaccgaaaagcctgtatgtgctgcgaatgctggtgggcattaccgaagcgggctttttgccaggaatattgctctatttaacctactggttcccggcatttttccgcgcccgcgccaacgcattatttatgattgccatgccggccactaccgcgttggggtcgattgtctccggctatattttatcgctggacggcatattcaatctgcatggatggcagtggttattcctgttggaaggatttccgtcagttttgttaggcattatggtctggttttacctggatgataccccggcaaaagccaaatggctgacggcagaggataaaaaatgtttgcaggagatgatggatagtgaccgcctgacgctggttcagccggagggggccatcagccataacgccatgcagcagcgtagtctgtggcgcgaagtattcacgccaattgtactgatgtatacgctggcctatttttgccttaccaatacgcttagcgccattagtatctggacgccgcaaatcctgaaaagttttaatgaaggcagcagcaatatcaccatcggcctgctggcggcgatcccgcagatttgtactattctgggcatgatttactggagccgccattcggacaaacatcaggagcgtaaacatcacacggcgttgccgttcctgtttgccgccgcgggctggctgctggcgtcggcgaccgaccataacctgatccagctcctggggatcgtgatggcatccacgggttcctttagcgcgatggcgatcttctggaccacgccggatcagtcgatcagtttacgcgccagggcgataggcattgcggtcatcaatgccaccggcaatattggctccgcgctcagcccgtttatgattggctggctaaaagatatcaccggtagcttcaatagcggactctggtttgtcgcttctctgttagtcgtcggcgccgccattatctggcttattcccatgaaagcatcgcgtccgcgcgccaccccttgaggagaaactatgtgccaacgtgcgatcgccaatattgatatcagcaaagagtatgacgaaagcatgggcagtaacgatgtgcattatcagtcgtttgctcgtatggcggatttctttggtcgtgatatgcaggcgcatcgccacgaccagttttttcaaatgcactttcttgataccgggcagattgagctacagctcgacgatcatcgctattcggtgcaggcgccgctatttgtgcttacgccgccctcggtgccgcatgcttttattaccgaatcggatagcgatggccatgttctgacggtacgcgaagagctggtttggccgctgctggaagtgctttatcccggcaccagagaggcctttggcctgccgggaatctgcctgtcgctggcggataaacccaacgagctggcggcgctcaaacattactggcagctaattgagcgggagtccacggaacaactggctggctgcgaacataccctggtgctactggcgcaggcggtatttaccttgctgttgcgtaatgcgaagctggacgatcacgccgcaaccgggatgcgcggtgaactgaaactttttcagcgctttaccctgttaattgacaaccacttccatcagcactggacggtgcccgattatgcctgcgagctgcatattaccgaatctcgtttgaccgatatttgccgacgttttgctaatcgcccgcctaaacgcctgatttttgatcggcaattacgcgaggcgaaacgactgctgcttttttccgacaatgctgtcaacgagatcgcctggcaattaggttttaaagatccggcttattttgcccgtttctttaatcgccttgctggctgttctccttcgcagtttcgccaacgtgaagttccctcttttctcaactaagaagagtaaaaacatgatgaaaaaaagcgtcgctatgctggcggtgtgtatgctggcgcaaagccaccttgccattgctgccggtactcctgcgcctcaagagatcaacattgttttactgggcaccaaaggcgggccttctttgctcaatacagccagactaccgcaagcgacggcgcttactatcggcgataaaatatggctgatagatgccggctacggcgccagtctgcaactggtgaaaaatggcattccactgcgcaacatcaatactattttgctcacccatctgcacagcgaccacatactggattatccttccttgctgatgaatgcctgggcgagtggtctgaaagaccataccatacaggtttatggcccgccgggaacccaggcgatgacgaaggctagctggaaggtctttgacagggatatcacgctacgcatggaagaagaggggaaacccgatccgcgcaacctggttaaggcgaccgatattggccagggcgtcatctataaagatgaactggtcacaataagcgcgctgaaagtgcctcattcccctttcccggacggtgaagcgtttgcttaccgttttgatacccagggtaagcgaatcgtcttctctggcgatacgtcctggtttccgccgcttgcaacgtttgcccagggggcggatatcctggtacatgaggcggtacatgtcccctcggtagcaaaactggctaatagtattggcaacggaaaaacgctggctgaagcgattgcgtcgcatcacaccacgattgaagatgtcggtaagattgctcgcgagtcccacgtgaaaaaactggtgttaagtcatctggtgcctgcgacggttgcggatgacgtctggcaacaggaagccatgaaaaattacccgggccctgtcattgtcggtcatgacaatatgacgataagcgtaccgtaggtatcagagcagggataaacccacgggctgacatgatgtcagcccgttatgcttttggcgatcagcatgacgcgcagagcttttgtctaaaacattattttttctaaacactacttgctgatttttatgcacaataaaggtaagatgattgctctggtgaaatatcactaaataagaatgtcacggatggaatttatacagtgttaaaagcaatgcgtttctttgtctgccggccatcagtaatatcctctgtaccggctcctcgttgccaaagtgaaggttagattaaacgaatcaaaaaatatccgaactgtacaatttttatatcaaacatatttaactgcaaaatactgcaaacgtgcgcgaatacacttaatcagtagtatggctaatgcatactttatttcctaaactttcttattatctatttgaatatttctggttaaaccaaatggacaaacggataccagacactcgaaaggataactgcaggcttctggtttaggattgcagttaccaggacaatggctattttctttaagcgatttccatagaacaggattaaacctggtaacgttgtaaacagtaacgggataaagtttatcgtttattaagacccccttattaaaggggatgataatgctacctggaggcatgtaaacatctgcctgataccataaggtcaatctaagattttttaggctatgtatgcatgagaacgacactccggtagagggacttataactgtatcaacgaccttccattccattacagaaaccttttaagtgaaatagtcaatggtgtaaattacattttccgcaagcctattcaggatagatgaaaatctgagaaacataactcgttgaaaacgatcgttttttattgaccactctatttatattgattttttaataagttatttattttatgctcttattttgtttacattctattacatttttgtattttaggcgtggtgtaaatattgggcggtagtggatgttataacgctcaattattaaactgtaagtgactgttgtatttcttatttataaataccgcaacctgtaagcgcagcggtacattttacccggcattgacagggagaaggtacgtatcaaccagagagtacaaaacagtgaaagaatatattcttcaggcaataaatgatcgctaacgtgtaaaaataaccgacgtatctaaaaaatgtgaacgtgtggctggtctttatttaaacgatgatcttcgcaatggcgcattaatggctgacattggcggttcgttgatcgggttgtgcgcggtgaaaggctatatttcttccgttgagggaagtatgtcagaggcattctggtattataccgggtgcatgtaaatccggggtgggcagaaagcccaccctcggtttattgcctttatcgtggattagggatgcgagataaagcgagaaaggcgttgcagcagtaaccggttttcttcgcgcagccgtgaattctcttccagcagcgttaacgcgaccgcgatcccaggccagtcgagcgccagctcctcgcgtaagcgtagcgcgcgttgtaccacgctcgctgcgcgatcgtcgaattgccagtcggcgttatcgtcttcgtaaggctcaattacgccaagtccgacgatttcgtttagctcctcttccgtcacgccggtgtgcaaacaaaattcggtgatggtaaaggtgacagtgatgttagccattatgctttcccccattgctggcgtgggtcaaaggacgactgcgcgtccgccagttgttgccacagggcagctgttttctcgtcaggtttcggcggcataacgattttgatgatggcatagagatcgccagtgtgctttttactggctaatccttttcctttgatacgcagccgctgacctgcctggctgccggggggaatggtcagcaaaatacgctctttaagcgttggcacagacaccttagcgccgagcgccgcctcccatggggcaagcggaaggacgacttccagatcctgattgacgatatcaaagagcggatgcggggcaatatggataacgagccataaatcgccattaggtccgccgttttcccccggcgtgccctggcctttcagtctgattcgttgcccgttgctgacgccagccgggattttcacattcaatgtcttgggaatttcccgctccaccaggccgaacgcgttataaacggggacggaatagctaatcgtacgctggtgctcttccagcgtttcttccaggaataccgccacttcaatttcgatatcatgaccgcgtgcggcgtggcggtgatgcgaatggcgaccgtgctgaccaaaaatagacgagaaaatatcatcaaaatcttcagcgttatacggctggccttcgtgttgctggaactggcgattaaattgtggatcgttacggtgttgccataactggtcatactcggcgcgccgttgctcatcactcagcacttcccatgcttcagcaacctctttgaaacgggcttcggcatcgggttctttgctgacatctggatggtacttgcgggccagtcggcgataggcggtcttaatcgtcttgagatcgtccgtcggtttcacgcccataatggcgtaataatccttaagttccatagcatcatctcgctaaatcaatacatacagaagggaccccaaaaggtttctccactaagtgtagggtaaacctgaaaagtgcgtatgaaaacaccagttatatcattagtaagaataaattacgttgttcgactatcagaaggttgcgcagcgcgccgacataactttacaggggaaaggttgccaaaaccgcgccagtggctaagataactcgcgttaaacagtgagggcgcaatggcgaaacaacaacggatgggctggtggtttctttgccttgcatgtgtcgtggtaatggtttgtaccgcgcaacgcatggcgggcctgcacgccttgcagatgcaggcgacggcctctgctgcggtggtcagcgctccctcctcgacagatgacggctcgccggtcaccccctgcgaattaagcgccaagtcgctgctggcggcgcctccggtactctttgaaggcgctatccttgcgctttgtctactgctttccttactggcgcctgtccgggtcatgcgcctgccgttttcgcctccacgggctatttcgccgcccacattacgggtacatctacgattttgtgtcttccgtgaatgacagaccggttattgctaacggttaattactcattcacggagaaaaaatatgatgattttgttcaggcggatactgttctgcctgttatggctttggctgcccgtctcctgggcggcggaaagcggctggctgcgttcgcccgataacgaccatgccagcatacggctacgtgccgatacgtccgctaacggtgagacccggctgttgctggatgtcaaactggaaaacggctggaaaacctactggcgcgcgccgggggaagggggcgtggcaccctctatcgcctggaaaggcgacatgcctgaggtaagctggttctggccaaccccctcgcgctttgatgtggcgaatatcaccacccagggatatcacgacgaggtgacctttccgatgatcgtgcgcggtacgctgccggcgaccttgcgcggtgtgttgacgttatcaacctgcagcaatgtttgtctgttgaccgattaccccttttccgtgacgcctactgtgcagaatgccgattttgcccatgactatgcgcgggcgatgggtaaaattccgctccgcagtggactaacggactcgcttgacgtcggctatcgcccgggagaactggtggtcactgctacgcgagcggcgggctggtcatcgcccgggctctatcttgacaccgtagatgacgtcgattttgcgaagcctcgtctgcgcgtagagggcgacaggttacaggcgacggtgccggtgacggacagttggggcgaaaaggcgcccgatttgcgcaacaaatcgctgaccctcgtgttagccgatggcgctatcgcccaggagagcacgcaaaccattggcactgcgccagcgcaaacgccggacaatgcggcgctacctttctggcaagttgtaatgatggcgctgatcggcggactgattcttaatttaatgccctgcgtactgccggttctgggcatgaagcttggctctattttattggtagaggaaaaaagccgctctcacatcaggcgacaatttttggcttcggtcgccggtatcattgcgtcatttatggcgctggcggcgtttatgaccctccttcgcctgtcaaaccatgcgctggcctggggagtccagttccagaatgtatggtttattggttttatggcgctggtgatgttgttgtttagcgccagcctgttcgggctttttgagttcaggcttccctcatctatgaccacgaaactggccacttacggcggtaacggtatgtcgggacatttctggcagggggcattcgccacgctgctggcgacgccttgtagcgcgccgtttctgggcacggcggtcgccgtggcgctcacggcgtcgctgccgacgctgtgggggctgttccttgcgcttggcctggggatgagcgcgccgtggctactggtcgcgatacgaccagggcttgcgctacgtttaccgcgccccgggcgttggatgaatgtcctgcgcaggatcctcggtctgatgatgctggggtcggctatctggctggcgacgttactcctgccgcatttcggcttcactgcgtcaaagagcgcgcaagacacggttcagtggcaaccgttgagtgaacaggcaatccagtcggcgctggcgcagcataagcgggtatttgtcgatgtcactgcggactggtgtattacctgtaaagtgaataaatacaacgtcctgcaaaaagaggatgtgcaggccgccttgcaacagccggatgttgtggcgctgcggggagactggacgctgccgtccgatgccattacagattttctgaaaacgcgcggccaggtcgccgtgccgtttaatcaggtatatggccccggcttgccggaaggggaggcactgcccactttgctgacccgcgatgcggtattacaaacgttgaaaaaagcgaaaggaataacccaatgaaatacatgattgttttactgctggcgctgttttcgacgctgagcatcgcgcaagaaaccgctccttttacgccggatcaggaaaagcagattgaaaatctgatccatgcggcgttgtttaacgatcctgccagcccgcggataggcgctaaacaccctaagctgacgctggtgaactttacggattacaactgcccgtactgcaaacagctcgatccgatgctggaaaagattgtgcagaaatatcctgacgttgcggtcattattaaaccgctgccatttaaaggagagagttccgttctggcggcgcgtattgcgctgaccacctggcgcgagcatccgcaacagttcctcgcgctacatgaaaaactcatgcaaaagcgcgtttaccatacggatgacagtattaaacaggcccagcagaaagcaggggctacgccagtgacgctggatgaaaaaagcatggaaacgatacgcactaatttgcagttggcaaggctggtcggcgtgcaaggaacgccagcgacgatcattggcgacgagctgattccgggcgcagtgccctgggatacgctggaagcggtggtgaaagaaaaactggcgtctgccaatggcgggtaaactgcggcgttggctgcgtgaagccgcggtttttctggcgctcctcatcgcgataatggtggtcatggacgtctggcgcgcgccgcaggcgcctccggcgtttgccacgacaccattacgtacgctgacgggagagtcgacaactctggcgacattgagcgaagaacgccccgtactgctctatttttgggccagctggtgcggggtatgccgctttactacgcctgcggtcgctcgcctggcggcggaaggggaaaacgtcatgaccgttgcgctccgctccggcgatgacgctgaggttgcccgctggctggcgcgcaagggcgttgacttcccggtcgtcaatgatgctaacggcgccttatccgctggctgggaaatcagcgtgacgccaacgctggtggtggtttcacaaggtcgggttgtgttcaccaccagcggctggaccagctactggggcatgaagcttcggctatggtgggcaaaaacgttctgaatatgcgccggggtttcccggcgctaacgcgtttactgtaagaaaaacccccgttttgcgaaatcgttcccggaaaaatgatccatttctgtcacactcagaacgatttgataacaacaagaggtcatagggatgaaaaaatcattactcgctgttgctgtggcaggggctgttttgttgtcatccgccgtacaggcgcagacaacgccggagggttatcaattacaacaggtgctgatgatgagccgccataatctgcgggcgccgctggcgaataatggcagcgtactggcgcagtcgacgccgaacgcctggccggcgtgggacgttcccggcgggcaactgacgacgaaaggcggcgtgctggaagtctatatgggacactacacacgtgaatggctggtcgcgcaggggctgataccgtcgggagaatgtccggcgcccgacacggtatatgcctatgcgaatagtttgcagcgcaccgtcgccaccgcgcaatttttcattaccggcgctttccccggctgtgatattcctgttcatcatcaggaaaaaatgggcactatggaccctaccttcaatccggtaattaccgatgattctgccgcgttccggcaacaagccgtacaggcgatggaaaaggcgcgtagtcagctacatcttgatgagagttataaactgcttgagcagataacgcattatcaggactcgccgtcctgcaaagagaagcatcagtgttcgctaatcgacgcgaaagataccttcagcgcgaactatcagcaagagcctggcgtgcaggggccgcttaaagtagggaactcgctggtggatgcgtttaccctgcaatattacgaagggtttccgatggatcaggtcgcctggggcgggatccacaccgatcggcagtggaaggtgctgtcaaaactgaaaaacggctatcaggacagcctgtttacctcacccacggtggcgcgcaatgtcgctgcgccgctggtgaaatatatcgataaggtgctggttgccgatcgcgttagcgcgccgaaggttaccgtgctggtggggcatgattccaatatcgcgtcgctgctgacggcgctggattttaaaccctatcagctccatgaccagtatgagagaacgccgattggcggtcagcttgtcttccaacgctggcatgacggcaacgctaaccgggatttgatgaaaatcgagtatgtctaccagagcgcccggcagttacgcaatgcggaagcgttaacgctcaaatcgcccgcgcaaagggtaaccctggaactgaaaggatgtccggtggatgcgaacggcttctgtccgctggataagttcgataacgtcatgaacactgctgcaaaatagccatatgcccccgcgcaggcgggggcgtttgtgttatacgtttttacgttcgatgatttgttcgccccagaagagcgagtctttgtccgttttctcaaaggctttgatcagcacctcatcgctaccttcttcccatattttttctgccagtttctcgtcatagtgagcgacttcaaaaatggcttcggcaatttccggcgacgtattacgcaggcttgcccattcgccgacgcggtgcgcttttgcttcttgagttggcattcgaatcctcctgttgaagattagccgttgagtttgactgccagaccggcgacgtattccccctgatagcgagcgatagagagttcctcctggcttggttgacgtgaaccgtcgcctccagcgatagtcgttgcgccgtaaggcgtgccgccgcgaacctgggagacgtcaaagagttcctgtgcggcatagcctatcgggacgatcaccatcccatgatgggcaagcgtagtccaggtcgaggtgatggtctgctcctggccgccgcccgttccggtagaactgaacacgctgccgagcttgccgtatagcgagccggatgcccacagtccaccggtttgatccaggaaggtacgcatctggcctgacatattgccaaaccgggttggcgtaccaaaaataatggcatcgtaatccgccagctcctgtggggtggcaaccggtgcgttttgcgttttaccgccagcttttgcgaagatttcaggcggcattgtttctggcacacgctttataatgacctctgcgccgtcgactttctttgccccttccgccaccgcgtgcgccatggtttcaatgtgtccgtacatggaataatagagcaccagaatctttgccatttgtactactcctcagattaatcaggtgtgtagcgattcgctacgtctatttaaagatatgctctcctgtgaagagtgcaaatttcagcgccatttctttgatttataacaataattaatttggcgacctttgttgcaaaatgatacatttttaagcgctttgattttcccaaatataagaataacttatttatttcttatggttattattctgcgtattcggcttccaatgttgcagaatatttcggtaagcggcctactacgacgtttttcactatgcttaatgttacgcggcgttactgatgatatcgttcatacgctgcgcgaggagatactcctcattacctatgcaatatgatgtctaatctatgacggaggtcagtaatggcaaaccatcgtggcggttccggtaattttgcggaagaccgcgaaagagcatcagaagcaggtcgtaaaggtggtcagcacagcgggggcaattttaagaatgacccgcagcgtgcatccgaagcaggcaaaaaagggggcaaaagcagtaaccgtaatagctagcctgcgtcacaacagcaagacgctgagcgtttcgcgctaaaaagtgtcatgcgccaccgccgccggatttccggcggtttttttgtttataagccggatttggtatgcttgcgtcctgacaaaaaggagagggcgcatgtcgcaacgcacagagaaaaaaatcgggaaacgctcgcaggccaccggtgcaaaacggcagcttatcttaaccgccgcgcttgctgttttttcccagtatggcattcatggcgcgcgtcttgagcaggtcgccgagcgggcaggcgtctccaaaaccaatctgctttattattatccctcgaaagaggcgctgtatgtcgcggtaatgcgacagattctggatgtctggctggcgccgctcaaggcgtttcgcgcagaattttcccctctggaggccatcaaagagtatatccgtctcaagctggaagtttcgcgtgattatccgcaggcgtcgcggctcttctgcatggagatgctggcgggcgcgccgctcttaatggaggaactgaccggcgatctaaaagcgttgatagatgaaaaatccgcgctgattgccggatgggtgcacagcgggaaactggcgcccatttctccgcaccatttgatcttcatgatttgggccgccacgcaacattacgccgattttgcccctcaggttgaggcggtaaccggcgcgacgcttcgcgatgaagccttttttaaccaaacggtcgaaagcgttcagcgcattattattgaagggattcgcgtgcgttaaccggctggcggcagtgggcagctcaaatccccctcttcacattgcagcagcgaggctaaaaacgcttcgcgttcgttcgttttatcggtcaggcactggctggcgatcatgggttgcacgctgccgccctccgtacctgagcgaatcagcgcgcaatcggcgtcgcgcagggcaatccatgccacctgtgctttttgtaacagctcgcgctgcggcggttgcgcacgcttaagcgcgctttgataggtttcgttcagctttttatctgccgcctggtattgcgcggcggcgcagcgattcatttccagctgcgtactggcgctggcacactcatcggccaacgcctgactgctgatcaacaacgccgcgcaggtaaggaaaattcgtttcatacggtcctctgacgcgagtaaaaaggctccattgacggagccttaattaaccacagtattagccaattgtcatcaggctggcattaccgccagcggcggcagtgtttacgctcagcgaacgttcaatatagagccgttccagcagtatattgctttcgccgcgggcgaacccctgtaccgacactatcgcgccttcgcgggcggcgacggcttcgcacacggttcgcagcttgtcggagtcgccgtggaaaatcaccgcgtcaaacggctgcgccatcagcgtttccgctttcgcaaactggacacgcgccgcgacggcggcggggagacgtttcgccagatcgcggtggaaggcgtcgtctgaccatagcgcctgactgccgacggcgagaacggcggcaagctgcgtcaacgcgtcctgttcatcatcagccaggcataatacccgttcacgcggcaacaacgtccaggtattgcgctcgccggtcggccccggtagcaggcgctgcgtgccggcctgggccagatcggcgaattgtcggcagagcgtctgtagcgccgggcgatccgccgcccattgtgtcagggcggtcaacggcgcgagtagcgtggttttaagctgcgcatccaccgggtaacgcgcatcctgacgagtcagcgtcgtattgagcgcattgggcgggcggtgtgccagcaggcggtagagatagagcggtcctcccgcttttggcccggtgccggacaggccttcgccgccaaacggctggacgccgacgaccgcgcccaccatattacggttaacgtacaggttgccgacatgggcggaaccggtgacttgcgcaatggtttcatcaatacgggtatgtacgcccagcgttagcccgtagccggaagcgttaatctgttcgataagctccgccagttggttacggttataacgcacgacgtgcagcacgggcccgaagacctctttttccagttctgcgaagttttccagctcaataagcgtgggcataacaaacgtaccggtctgccattcctgcgcatcatcgctgttttcacgtgcggcctggaaaaccgggcggcctttggcgcgcatcgtctggatgtgacgttcaatgttggctttggcctcgctatcgatcaccggcccgatatcggtcgtcagacggcctggattccccatccgacactccgccatcgcgccgcgtaacattttcagcgtatgttcggcgatatcgtcctgcaaacacagcacgcggagcgcggaacagcgttgtccggcgctgtcgaaagcggaagccagcacatccacgaccacctgctcggtgagcgcggaagagtcgacaatcatagcgttcataccgccggtttccgcaatcaacggaatagggcggccctgggcgtcaagacgcgtggcgatgttgcgctgcaacaacgtcgcgacctccgtggagccggtaaacatcacgccgcgtacacgcgcatcggcggtaagctgggcgccgacggtttctccccgtcccggcaacagttgcacgacgcccggcggtacgcccgcttccagcaaaatggcaatgccctgggcggcaatcagcgatgtctgctctgccggtttcgccagaacgctgttacctgccgccagcgcggcggcgatttggccggtgaaaatggccagcgggaagttccacggactgatgcagactaccggccctaacgggcgatgcgtttcgttatcgaaatcgtcacgcacttgaccggcataataatggaggaagtctaccgcttcgcgcacttcggcaatggcgttgctgaacgttttccccgcttcacgcaccaacaggccaatcaactgctgcatttggtcttccattaataccgccgcccgctgcaaaatagcggcgcgttcttgcggcggcgtcgcaaaccaaaccggcgcctgattgaccgcgttttgcaatgcctgttcaacctcgctttctgtcgcttcgcgtccccagccaacaatatctttcggttccgccgggttgataaccggcgtcatctcaccgtcggccaccggttgttccagcacaggtttggcctgccatttctgcatggcgttgcttaacagggcagaagaaagcgaggcgaggcgatgttcattcgctaaatcaagtccggcggagtttatccgaccttcgccgtacagatcgcgcggcagcggaattttcggatgcggtatgccagcctgaccttcctgctgcgccagtttttccacggcctcgaccgggtccgccaccagttcatcgagcggtagggtggcatcggcgatacggttgacaaaagaggtgttggcgccgttttccagcaggcgtcgtaccagataggccagcagggtttcgtgtgttcccaccggcgcgtaaatacggcagggacggttaagttttccgtccgccactttaccggtgacctgttcatacagcggttcgcccatgccgtgcaggcactggaattcgtactgacccggatagtaattttgcccggccagatgataaatcgccgccagtgtgtgagcgttatgggtcgcgaactgcgggtagatcagattagggacggcgagcagttttttcgcgcaggccagataagagacatcggtatacactttgcgggtataaaccggatagccctccagcccttccatttgcgcgcgtttgatctcgctatcccagtaggcgcctttcaccagacgaatcatcagccgacggcggctacgggaggccagatcgactaaataatcaatgaccagcgggcagcgtttctggtaagcctgaatcacaaagccaatgccgttccagcccgccagttcgggttcgaagcagagtttttccagcagatcgagcgagatctccagacgatccgcctcttcggcgtcgatattgagaccaatgtcgtactggcgcgccagcagcgtcagggatttcaggcgcggataaagctcctccattacccgatcgtattgcgcgcgactatagcgtggatgcagggcggacagcttaatcgagatgcctggcccttcgtaaataccgcgaccgttagacgctttgccgatggcatgaatcgcttgctggtaagaaaccatataggcctgcgcatcggcggcggttaacgcggcttcgcccagcatatcgtaagaatagcggaaccctttctcttccagttttcgggcattcgccagcgcctgagcaatggtttcgccagtcacgaactgctcgcccattaaacgcatcgccatgtcgacgcctttgcggattaacggctcgccgctcttgccgataatgcggttcagcgagcgcgatagattggcttcgttatgcgttgagaccagtcggccggtaaagagcagcccccaggtggcggcgtttacaaacagcgacgggctacggccaatatgcgactgccagttgccattactgattttgtcgcgaattaacgcatcgcgcgtagctttgtcgggaatacgcagcagcgcttccgccagacacatcagcgctacgccttcttgcgaagagagggaaaactcctgcaacaggccttgcaccatacccgcgcgaccgctggcggatttttgattgcgcaatttctccgccagttgatacgccagtttatgcgcctgctcagcgacaggcggcgacaggcgcgcctgttccattagcattgacaccgcatcggtttccgggcggcgccaggcggcggtgatggcggcgcgagagacggattggggaagaatttgttcggcaaactccagaaagggctgatgcggctcatcctgcggcgcgaccggctcctcgctttcatttgccgcgccgacaaacagcgcaggtagctccggtagcgtatcgctattttccagcttgtccagatagctaaagattgcctgttttattaaccagtgcggcgtgcgatcgatacgcgacgcggccattttgatccgttcgcgcgtggcgtcgtccagcttaacccccatcgtggtggttcccataccctctactcctgttattcgctctatctgctaaccaatagttagcggaaaatatccaccatgttgcaactttgtgcaaccgcgttaaatgtgacctgcgttgcaagcttaaaaatgaatgaattgttaaaaaaagataagggagtgtctgacgagaaaaccatctggatttattttctctgcggtagttaacacttttaaaaggtgcaaccgcaaaaaatgtgagagagtgcaacctggagaaaaatagtatccctctgcaatcaaatttgatgtaaatggtgtgttaaatcgattgtgaataaccaccgcttccggcaggatacggtcgccctggtaaacataacacccttgccacgttccggcagggtacaaaacggcacgctacggtagtgccaataaataaatttggagaaccttgatggctattagcacaccgatgttggtgacattctgtgtctatatttttggcatgatattgattgggtttatcgcctggcgctcaaccaaaaactttgatgactatattcttggcggtcgcagtctggggccgtttgttacggctttatcagccggcgcgtcggatatgagcggctggctgttaatggggctgcctggcgctatctttctgtcggggatctctgaaagctggatcgccattggcctgacgttaggcgcatggattaactggaagctggtggccgggcgcctgcgcgtgcataccgaatttaacaataacgcgctcacgctgccggactattttaccggtcggtttgaggataagagccgagtcctgcgtattatttccgcgctggtcattctgttgtttttcactatctattgcgcgtcaggtattgtcgctggggcacgactgttcgaaagcaccttcggtatgagctatgaaaccgcactgtgggcgggggccgcggcaaccattatttatacctttatcggcgggttccttgccgttagctggacggataccgttcaggccagcctgatgatttttgcgttaatcctgacgccggtgatggttattgttggcgtaggcggtttcagcgagtcgctggaggtgatcaagcaaaagagcatcgagaatgtcgacatgctcaaggggctgaattttgtcgctattatttccctgatgggctggggactgggttacttcggtcagccgcatatcctggcgcgctttatggcggcggactcccatcacagcattgttcatgcgcgtcgtatcagtatgacctggatgattctgtgtctggcgggcgcggtggcggtgggcttctttggcattgcgtactttaacaataaccccgcactggccggggcggtgaaccaaaactcagaacgcgtatttattgaactggcgcagatcctgtttaacccgtggattgccggtgttctgctgtctgctatcctggcggcggtgatgtcgacgttgagctgtcagttgctggtatgctccagcgcgattacagaagatttatataaggcttttctgcgtaaaagcgccagccagcaagagctggtatgggtagggcgagtgatggtgctggtggtagcgctgatcgccattgcgctggcggcgaatcccgataaccgtgtgctggggctggtgagctacgcctgggctggattcggcgcggcatttggacctgttgtcctgttttctgtgatgtggtcgcgtatgacacgtaacggcgcgctggcgggaatgattattggcgcggtgacggttatcgtctggaaacaatatggctggctggatctgtatgagattatccctggcttcattttcggcagcctggggatcgtaatctttagcctgcttggcaaagcgccgacagcagcgatgcaggaacgctttgcaaaagcggacgcgcattatcattccgcgccgccgtcgaagctacaggcggaataaccgacatgtccgatagcattattgccatcggacatattttaccaggcggcgttatacgcccgcctggtcctctgataagtcccggaccgattgactgaagatgttcaggtaaatgaggacgcactctcaaactatttttagcccttgagcgccgttaacgcgggcgtaatacatctcgagtaatcactaactagccatatatgaaatcgcctgttaatggtaccaatagccttgacgcaatagagtaatgacaaaaattaaaacaagtcagcgttactggcgtaagtatgccgcataaaattttgcataaataatgccgttttagcgatgggagagaggacacgttaattattccattttaaccttatatatgttcaatattcaatgggttatggatgttttcagcattaatacccgcagtagctaatgattatcttttttagtctcctgccgatgaaataatcgtgtaatctttctgtaagagactgacaatgacgcaataatgtttggttaatgcttggtgaatatattgttgcattattgatgttttgtgttgtacttagtagtaatagcggtagttccccggcagtgatggtcactcactatggagatcgcgaatggtaatgtccgcaccaggacacattgtttacagtagttacaacaccctgtacggacattctctctccggtggtggtcttgtcatcttaaaagctctcatcatttcccttactgaccatacccatgacgtcatatgtggtgcgcgtagccgtgtgtggcgtcgtttcaaaaagcaagctaaggcttacaaggaagccaaccctcagatgtgtgtgcgcataatcgcgttcaagagaacgcgggtgatgtatacctacaactcaaggtgctatccatgggaagacaaaaagcagtgatcaaagctcgtcgtgaagcaaagcgtgtgttgagacgagattcgcgtagtcataagcaacgtgaagaagaatcggtcacgtcactggtacagatgggcggagtagaagccattggcatggcgcgcgatagtcgcgatacctctcctgttaaggcgcgaaatgaagcacaggcgcattatctgaacgctatcgacagtaaacagcttatttttgcgaccggcgaagccggctgcgggaaaacatggatcagtgcggcaaaggcggcagaagcattgattcataaggacgtcgagaggatcattgtgacgcgtccggtattgcaagctgatgaagaccttggttttttgcccggtgatatcgctgaaaaattcgcgccttattttcgtcccgtctacgatgtcctgcttaaacggttgggcgcgtcctttatgcaatattgtttgcgcccggaaatcggtaaggtagaaattgccccgttcgcctatatgcgtgggcgtacttttgaaaatgcggtcgtgatcctcgatgaggcgcaaaatgtgactgcggcgcaaatgaaaatgtttttgacgcgattaggcgaaaatgtcacggtcattgtcaatggcgatattacgcaatgcgacctgccgcgcggcgtgcgttccgggttgagcgatgcgttggaacgctttgaagaagatgaaatggtagggattgtgcatttcaacaaagacgactgcgtgcgctcggcgctttgtcagcgaacgcttcacgcatacagctaatatagcattgactttcagagcccgggaaaccgggctttgttatctataaagcatccagcagactcatggacaaaaaaggaaaatgacgcctgtacgtgaagggaattattttgtcatgtccagggcattcattgtccgtaatttgctttctcgggcctgttccggcgaggactgtacaagaagggtatagagcaggtcaaagacgaaaagctgcgcggctttcgtaccgatcgagtcaccctgcaacattccttgccgattaccattgatcaggcaaaaatcggcctcttcacataatggagaacccagattatgggtaatggcgactgtggtggcgccagcctgtcgggccaatcggagtgaatgcactgtttctggcgatgtgcccgagtgactgacacccatcgcgacatcgcctgcttttaatagcgtagcctgcatgtacataaaatggttattgcttaccgcatcgccccgtaaaccaatacgcattagcttgtgtttcatatccagcgccgtgatccccgatgagcccacaccaaagatataaactgagtgacagtgacgtagggcatccacgacaccgagaacctgttgcatatcaagcagatttagcgtttcagataatacattactaatggtgttctgcaattttaaaccaatggcgtgggcatcgtcggattcgctaacttcggcatccagtagaggactactgtcatcagactcggtagtggcaagttcaatggccaggtccattttaaaatcctgaaaacctttatagcccagggtgcgacaaaagcgaataaccgtggcttctccggcctgtgtttcgcgcgacaaatcggcaatagatgactgtgtcacctgtctggggaaggctaaaatatattgcgcaatacgctgggaggcacgtgtcaggcttttttgcatagcacccagagtatcaaggatttttccgggtttaagacgtgggggttgaggctccatatagttcctgctcttgagggctgattgcggcacaaagcctgcaatatcgaacagagcagagcctatcaagtctgcggcatgaaaaaaagcgcgatgtaagtaaaggagggggaatatttacatcgcgttgccaacttatgacagaacatcactggagagtaatctgttgctcttacggtgtttatagcgcgccatttgacggatggtttatacctggcccggtattgtcgccccgcgcgttggcgtcaccgtatgctgtgtcggtatagcgtggtatcatgaaatcataatgtcacctttggttcaggtttttcatccagcgtcaatggcggtgccggggcaaataacggggcgaaaataacgccgctgatcaccacgcttagcgagccaatgaccccataaaagaagaagttaaggtcagtggcatagcgtgcgcccagcacggtaatgacgctgataataattcctaaaaccgcactcccggcatttgctcgtttaaagaaaatgcccagcatgaacagaccggtcattggccctcccatcagacctatcagactattaaatgcatcccagatttctgattcatcggccatgaccagccataccgaggccgcgctacttatcaagcccgcgaccagaataactaacttagctattttcatacggttttctggcgttctttttttatgactcaaacgctgatagatatcggaattaaaacaactggaaatgctgtttaagctgctggagatactggactgcgcagcagcgaaaatagcggcgattatcaaccctgcaatgccgactggcatttcggtgaccacgaataagggcaaaatgccgccagtgttgaatcccgccggtaataattgtggatgttgctgataatagacaaacaatgccgagccgatagcaaaaaagaaaacagggatcacagcaaccagtttggcatttgtaagtaatgttttcttcgtttcctctatggagtcagtcacgatatagcgttggaccacatcctgactggcagtaaattgctgaatattggcaaacagaaaaccaatcatcaatacaggtactgtgctttccgtccagctccagtggaactgcgtagccggaaagaatttatccgcctgctgcgtcaccgtaaaaatttcatcaatgccgccctggactttgagacatatcactataaaaatcagtatcgcgctgccagaaagtaagaggccttgaataacatcagtccatattactccttcaattccacccatccaagtataaatgatacacatcacgctaatcaacagtaccaaaatcaccgggtctatagcgatgaaggggcgcaaggccagcacggtgaggaaagtgataatggcgatacgtccaatatgaaacaacataaatgacatgctggcgaacagacggcagcgcacatcgaaccgtgcttcgagatattcataggctgatgtgactttcaatttccgaaaaaacggaatatagaaataaaaaaccagcggtaaaattgcgatagccagatactgaccaatgataaacgtccagtcggaagtaaacgctttggcaggaattgacataaatgtaattgagcttaacgtagtagcaaatacactgaccccagccgcccaaccaggaacccggccaccaccgcgaaaataatcgtctgctgttttttgccgtctggaaaaatagacaccgactaacatcatggccaggaggtagccaaataatacaagataattaacgatgccgaaagaatgtgtaatcatagttctttcctgcttatggttttgagtagagttgcggtcatcgtctgtgtatttttatcttcccatcattcagacgatacgatattcagatcaagtaatagtttttgttaatctcaatgacggtaatcatgagatgtaaaaggcagagcatttatgctccaccaatggtgatgcccagacgtatgtcctgccggatacctgaaatagcagatatccgatattgcgttcaaacaggcttcaggcctgggtctcgtatttgccgatagcattattaacgtcggattattctctgaggcataaatatcaatagtaagcgtgttcattttcttttcctgttcagcgttttactgcgtgactgaaccactgacagatatgctcaatacgggtgatagcggaaccaacggtaactgcccaggcaccatgctcaatagcattggccgccagtgcaggcgtgttatagcgcccctcggcaataacacgacaacctgcatggctcagttgtgtcaccattgccaaatctggctcaaccggcgtgatggggccggtatagccagacagtgttgtaccaatgaattcgattcctttctgatggcaacttatgccttcattcacggttgaacagtctgccatcgccagtaatccatgcaggcgaatacgtgtcagtaaactatcaatatcaaccgggcgagagcggaatgaggcatcaaaagcgataatatcggcacctgcctgcgccagggcgtcaacatcctgtaaatatggagtgatacggactggcgaccctgtaaggtcacgtttaattatcccaataataggaacagaaagatggggacgaacagtccgcagattctcaatgccttcaatgcgcacagcgaccgcacccgccgaagccgctgcctgtgccattgcagccacaatttcaggtttatccatagggctgcctggtaccggttggcatgagacaatcagcccaccgttttcgtgtacactttgttccagcctggctaatagtgacatccagttccgccttatatatttgaagttttgctccgttttatgttatgtcttggagtgttgctacatcaagcaaaaagatagaaaaatgtgaacacagtcataaggtatgtttgttattcaattactgcgccagcggatttgaggctataacctgaagctacaagacaaatacaattcattctgacggcagcatgctgtattttattaactgcttccggcataaagataaaatgctcagaaggagcttatacgccacgggatagccagtatgaaatgcatcacataattcttgttgtatttattcagaatgctatcactaatgagtttggccataacagatcacccataatcacttctaacatcaccatggggtgcttttacctcgcacatgataactccatgtaattatttttagcgcttggtcacattttgtcattgtcattgttgaaattgtgcaccataagatcactaatgatgaagctttactccaattgtatttcttcgcatggggatgcagatgaaaaattttaagaaaatgatgacgctaatggcgctatgtttctcagttgctatcaccacatcaggatatgcaacgacgcttcctgatataccagaaccactgaaaaatggtactggcgctattgataataatggcgtgatttatgtcggcttaggtaccgcagggacatcctggtataaaattgatcttaaaaagcaacataaagactgggagcgtataaagtcgtttcctggtggagctcgtgagcaatccgtgtcggtatttttaaatgatgagctttatgtttttggtggcgtagggaaaaaaaacagtgaatcaccgttgcaggtttatagcgatgtgtacaaatactcaccggtgaaaaatacatggcaaaaagttgacactatatctccagttggattaacagggcatacgggagtaaaattaaatgaaacgatggtacttattaccggaggggttaatgagcatatctttgataagtattttattgatatagcggctgcggctgcggatgaaagtgaaaaaaataaagtcatctataattattttaataaacctgccaaagattatttttttaataaaatcgtatttatctacaatgctaaagagaacacatggaagaatgccggtgagctgccaggcgcggggacggcaggatcgtcatcggtaatgggaaataatttcctgatgctgattaatggtgagctcaaaccgggtttacgtaccgatgtgatttaccgcgccatgtgggataacgataagctaacatggttgaagaacagccagttaccgccatcgcctggagaacaacagcaggaagggttggccggagcattttcgggctatagtcacggtgtcctgcttgtcggtggtggcgcgaattttccgggagcaaaacaaaattatactaatggaaagttttattcccacgaagggataaataaaaaatggcgagatgaagtctatggtttgattaatggtcattggcaatatatgggtaaaatgaaacaacctctcggctatggtgtatcagtaagttatggtgatgaagttttccttattggtggtgaaaatgctaaagggaaacctgtttcgtctgtaacctcctttaccatgcgtgatggtaatttattaataaaataattttttaaatacaaaaataaagttaattgatgagcggagtattttatgaaaatcaacaaatatcttctgggtatggtttcgtttatagcattttcatcatatctacaagcggcaacccttgattatcggcatgaatatgctgatagaaccagaattaataaagaccgtattgctataattgaaaagcttcctaacggcattggtttttatgtcgatgccagcgttaaatcgggaggagtagatggtgagcaggataagcatttaagcgatctcgtcgcaaacgctatagaactgggcgtaagttataattataaagttacggacaattttgttttgcagcctggatttatatttgaaagcggtccagacacttcaatttataagccttatttaagggggcaatataattttgattctggtgtttatatggctggtcgttaccgttatgactatgcaaggaagacagctaactatagtgatgatgagaaaacgaatagatttgatacttatataggttatgtttttgatgagttgaaattagaatataactttacctggatggatagcgatcaaattaaatttgataacaaaaaaacaaactatgaacataatgtggctttagcctggaaactgaataagtcatttacaccatacgttgaggtcggaaatgtagcggtgagaaataataccgatgagagacagacccgttatcgcgttggattacaataccacttttgagaaaggttaaagagttactgtactaatctttgcttagtattcatatcgataatcttatagcccgtagctacgttacagaacgttagactttgtcttgagtattcacgtccttaacgtagctacgaacaaggatgataaacaatgaatatacgccttacatagctacgatctcaggcggttgtcggaaagtgccgattgatagtgtcttattcggcaattgatatgacttaaaaattaattccgtaagcatttcagacggtaacagcaaataagggttttattgtgatagcaaaattcttcccgtggtatagcgagataactcgtccacaaaaaaatgctttattttcagcatggctgggttacgtttttgacggcttcgactttatgctgattttctacattatgtatctgatcaaggctgacttaggattgacagatatggagggcgcattccttgccacagcggcctttattgggcgaccatttggcggggcgctatttggtctgctggcagacaaatttggccgtaagccgttgatgatgtggtcgatagttgcctattctgtaggtacagggttaagtggcctggcttccggtgtaattatgctgacgcttagtcgcttcattgtcggtatggggatggcgggggagtatgcttgcgcttctacttatgccgtggaaagttggccaaagcatttaaaatctaaagcgagcgcatttctggtttcaggtttcggtattggtaacatcatagcagcctattttatgccgtcatttgccgaagcgtatggttggcgtgctgctttttttgtcggtttgctacccgttcttttagtaatctacatccgggccagggctcctgaatctaaagagtgggaagaagctaaactcagtggtcccggaaagcattcacaaagtgcctggtcagttttctctttgtcaatgaaagggctatttaatcgagctcaatttccactgacattatgtgtatttattgttctgttctctattttcggcgcaaactggccgatctttggtctactgcctacatatttgacgggagagggctttgatacgggcgtggtctctaatttaatgacggcggcggcattcggcactgtattgggaaatatcgtttggggtctgtgcgcagatagaattggtttgaagaaaacgttcagcattggtcttctcatgtcctttttattcattttcccgttattcagaattccgcaagataattatttactgctgggcgcatgtttattcggtttaatggcgactaacgtaggtgttggcgggttggttcccaaatttctctacgactactttcctcttgaggttcgtggtttgggtaccgggctgatttataatcttgctgcgacatcaggcacattcaattcaatggcggcgacctggcttggaataacaatggggctaggcgctgcgctaacgttcattgttgctttctggaccgcaacaattctactcattattggcctatccattccggatagactaaaagcacgtcgtgaaagttttcaatcaacaaaagaattttaatagaggataaatgatgacgaaatacggtgttgtaggtacaggttattttggcgctgaactggcgcgatttatgtctaaggttgaaggggcgaaaatcactgcgatttacgatccggtaaatgcggctccgatagcgaaagagttgaactgtgtcgccactgcaacgatggaggcgctttgttcccatcctgatgtggattgcgtaattattgcttcaccaaattacttacataaagcgccagtcattgcggcggctaaagcgggtaaacacgtgttttgtgaaaaacctatcgccttaaattaccaggattgtaaggatatggttgatgcctgcaaagaagctggtgttacctttatggcgggtcacgttatgaacttttttcacggggttcgccacgctaaagcgctcatcaaagctggtgaaattggtgaagttacacaagttcacactaaacgtaatggttttgaagacgtgcaggatgagatctcatggaagaagattcgcgcaaagtcaggtgggcatctgtatcatcacattcacgagctagattgtacactgttcatcatggatgaaaccccatccctggtttcaatggcggcggggaatgttgcgcacaaaggtgaaaaatttggtgatgaagatgatgttgtcctaatcacccttgagtttgaaagcggtcgtttcgcgacacttcagtggggatcatcgttccactaccctgagcactatgtattaattgagggcacgacaggtgcaattctcattgatatgcaaaacacggctggttatctaataaaagcgggcaaaaaaacacactttcttgtgcatgaaagccaggcggaggatgatgatcgtcgcaacggtaacatatccagcgagatggatggcgcaatcgcttatggtaaacccggtaaacgtacgccgatgtggctctcatcaattatgaaactggagatgcagtacttgcatgatgtgataaacggtctggagccaggcgaggagtttgctaaattgctaacgggagaagcggcgacaaatgccattgctaccgctgatgctgcgacgctttcctcaaacgaggggcgcaaagtaaaactcactgaaattcttggctaaaattgaaagccggatggtggtgttattggccggtggcgctgcgcttatgtagaccggataaggcgcccgtgaactgtgccgccatccggcaatggacggggcacatataagcaaaaagcccgtacttctgtacaggctctcaacttaaatatggcggtgagggggggattgactcgctgcgctcgcccttcgggcagtctcctcgcaagctcgtcgtctgtccaactggctgcgccagttgtcgaaccccggtcggtggttctcatccccccttggtttgggggatacatataagcaaaaagcccttacttctgtacaggctctcaacttgaatatggcggtgagggggggattgactcgctgcgctcgcccttcgggcagtctcctcgcaagctcgtcgtctgtccaactggctgcgccagttgtcgaaccccggtcggtggttctcatccccccttagtttgggggatacatataagcaaaaagcccgtacttctgtacaggctctcaacttaaatatggcggtgagggggggattcgaacccccgatacgttgccgtatacacactttccaggcgtgctccttcagccactcggacacctcaccaaattgtcgctccagcattactggaacgggcgctaatgtagggaaatatccattctacgtcaatcaacttttttcaaaaaaaagcgcgtttatacaaacttccaccaatctgtggttttaataagcgaaaactgctttttttgcccgcgccgggaaatttgctatgctgcacatcccgttgaaaacgctgataacaggcgcaatcacattccgcacaatactgctcaggagataacatggagataattttttatcacccgacatttaacgccgcctggtgggtaaatgcgctggagaaggctctcccacatgcgcgcgttcgtgaatggaaggtcggtgataacaaccccgcagactatgcgcttgtatggcagcccccggttgaaatgctggccggaagacgcttaaaagccgtctttgtgctgggcgcgggggtggatgcaattctgagtaaattaaatgcgcatccggaaatgctggacgcctccattcctctattccgtctggaagataccggaatgggcctgcaaatgcaggagtatgccgtcagccaggtattacactggttccgtcgtttcgatgattatcaggcgctgaaaaatcaggcgctatggaaaccgttgccggaatatacccgcgaagagtttagcgtcggtatcatgggcgcaggggtactgggcgcaaaagtggcagaaagtctacaggcgtgggggttcccgttacgttgctggagtcgtagccgcaaatcctggcctggcgtggaaagttatgtagggcgtgaagagctgcgcgctttcctgaaccagacgcgggtgctgattaatctgctgccgaatacggcccaaacggtaggaattattaatagcgaattgttggatcaattgccggatggcgcttacgtgctgaatctcgcgcgcggcgttcatgttcaggaggcggatctgctggctgcgcttgatagcggtaagctaaaaggcgcgatgttggatgtctttagccaggaaccgttaccgcaggaaagtccattatggcgccatccgcgagtcgccatgacgccgcacattgcggcagtcacccgtccggcggaagccatcgattatattagccgcaccattacccagctggagaagggagagccggtgacggggcaggtggatcgggcgagaggatattgatatcaacccggcgcgggccgggtttcgctaaaaaacgctggcgatacctgctatccttgtcggaaatgactacaggagagagcaatgtatcccgttgacctgcatatgcataccgtcgccagcactcatgcctacagtactctgagcgattatatcgcggaagccaaacgcaaaggcattaaactttttgcgattaccgatcatggtccggacatggaagatgcgccgcatcactggcattttattaacatgcgcatctggccgcgtctggttgacggcgtggggatactgcgtggcattgaggcgaatatcaagaatattaacggtgaaattgattgttccggaaagatgttcgactcgctggatctgattatcgcaggctttcatgagcccgtttttgcgccgcatgataaagaaaccaatactcaggcgatgatcgcgaccatcgccagcggcaaggtgcatataattagtcaccccggaaatccaaagtatccagtggaggttaaagccatcgcgcaggcggcggcgaaacaccatgtagcgctggaaatcaacaactcttcttttctgcattcgcgtaaaggaagcgaagataattgccgcgcggtcgctgccgccgtacgcgatgcgggaggctgggtagcgttaggctctgattcccatacggcctttacgcttggcgatttcaccgaatgccggaaaattctggatgcggtgaattttccggaagatcgaatcctgaacgtctcgccgcagcgcttactggcctttctcgaatcacgcggtatggcgcctgtaccggaatttgccgaactttaatcgttatttacgggaagatatcaatgaatgagttttcaatcctgtgccgtgtgctgggatcgttgttttaccgccaaccgcaagatcctttactggttccgctgtttacgttaatccgtgaaggtaaactggcggcaaactggccgctggagcaggatgacatgctggcgcgtttacagaaaagctgcgatatcacgcagatttccactgattacaatgcgttatttgttggggaagagtgcgcggtagcgccataccgcagtgcgtgggtcgaaggcgcggaagagtctgaggtgcgcgcttttttaacgtcgcgagggatgccgctggccgatacgcctgccgatcacattggcactttattgctcgcggcctcctggctggaagatcagtctgccgaagatgaaagtgaagcgctggaaaccttatttgccgattatctgcttccctggtgcaataccttcctcggtaaagttgaagcccatgccgttacgccattctggcgcactctggcgccgctaacgcgtgatgcgataggggccatgtgggatgaacttcaggaagaagatgaagaataatgtgatgtaaatcacccttaactgcaacgggttttacatcattgcataaaatgtgtgcgtgatctcattaatgtgccgcttttctgttatgatgcgcgccatgaacatacttctttctattgctatcacgacgggcatcctttctggaatatggggatgggtggctgtctccctggggttactaagctgggccggttttttaggctgtacggcttatttcgcctgtccgcagggcggctttaagggattgttgatttccgcctgtacgctgttaagcggtatggtgtgggcgctggtcattattcacggtagcgcgttggcgccgcatctggaaattgtcagttacgtgttgacggggatcgtggcattcctgatgtgtatccaggcaaagcagctattgctttcttttgttccgggaacatttatcggcgcctgcgcgacatttgcagggcagggtgactggcggttggtattaccgtcgctggcgctggggctaatctttggctatgccatgaaaaatagtgggctatggctggcatcacgccgcgagcaacattcagcgaatacggcggtcacaaaataaaaaagcgtggggttcttccccacgctttgtcgtattcatcaggattctggcggtactgacagctcacggtatttcaccagaatatcattttgcctgtccgctttattctgcaaatcccacagtccgcgatcgataccatcattaatgaggaagataacgccggtttcaatggctgacatcagacacagcatcaccggttcgttcgaggtatagccgatttcgccttccagtaagcgctggtaatcaataaaacggaacacgcctgcctgtacttcataggaaaggatcgttttactggtgttcaccgaggaaaggatctcgcccgtactgacgttaaccacgcgcaggttgacagcaatctgatccagctgatactgcgtatcggcgccaataccgaaatatcttgcgccgaccccgccggatttgacgttactttcataaccaataatagaaccttccaccataatatttgccgccgtcagcgactgaagcgggatacggttattcatcgccacggtgccgttttcctgggctgcgcgaataattttccgttcattcaaaagattctgtaagccttgtcgttccagcgggataaaccagcgcgaatctttcagcgcagtgaccaacatagcggtggcgctctgcggcacagccgtagaaaagttacttgccgggtaaggtttaaattggcccgtttcatcctgaatgttatataccgaaacaaagatcttaccggtgggagcaggtaagtgcgtcaaatctttgtaactttgtgcgcggggcattaatgtcggtttcgcagcttgtttcggcggggcagttaagcatccgctcaacaataaaacggcaaccaaaataagtaagcgcggcatgatttatatcctttagtgactgtagcttaaaaatcggttgactgagtttgtaaacctgacacttcgatggtcgaggttcttcccgtttttctgtccgtgacgttgagctggagctgtccgtcgcgattagcgatatcgataataaaatcgttggtcaccatacgtcctggtttcccggtattaatattggtcaacaagccgcccagaatttgcgattgaatagcctgcgtaaagttatccaacgctgagggggtttcgataccaaaatcgttatcataagcggggtctttatatgaattttgcgcctgggcgctattcaataaaaaggaaccgttattggggtttccaccaaagttaggattacggaactggaacgtcatatttccagcccaggttaatggcgaaaaaagcatgagcagcactactgcatgtttaacacgcatgacagcctccggataaaaatcatgttttagaattcatcacgcgctaaatcactcgtacttaatagcgtttgatctatttgtcggcgatttaatgcttcctctgtttgcgctaatgcgaagacgacggttttctcgaagtctcttttcattggaaataaaaaggtctggaaaataacgtcctgatttaccgttatggtgatccagcttccccaacgcgcactgggtctttcattaatggtcagattgccggtgtattcgctttcccatttgtcgctgaatgcacgatagaattcatgtcctatcgaagagacggtctggtcggttaacaatccgggaacctcgacttcaacttcattggcatgcaggtttccggtagcgaacagtaactctgctgctacaatccaggtcagatagcgtttcatggccttaccgcctgagattatcgtttgcccatgaaactgcctgggtgcgatttttgacagctatctttttgaaaagattataaagatgtgtcttaaccgtattctcgctgataaatagcgacctcgcgatttcattattagaggcaccaatacgtaacttattgaggatctctttttcgcgatgagtgagtaatgcggactcggtgctgttgtagcggtaatttcctgagtgcgtaatcaggtaactggctaatttttgtgaaaaatagcattcgccacgcagaataccctgtaatccgctgaccacgtgttcctggtcttcagtagcgtaaaacacgccgttaatatgaggccagttttcaatttcacggtagggataatcgtcaggggtatttaacaataatgtttttatattattgtttttgcggcttaaattatcctgccaatagtggataagcttcttatccgcttccatcatatccattaaaacaatgcaaccggccgagatatcttccagagaacgttgaatattatgcagttttccggttatggccagcgattgctttaaatgttgcaataatgccgtagcttgcagagatggctttgtgatcaacaatagtgtgtgaccatgactactatggacttcattaaacatgatgaaactccactttttttaatcgcacatctgacagctgcccccataaaataaaggcaccagaagtactgacagatgttgcactgctgtgggttgaaatagcccattatccagaaagagaaaaatatttacgaaaatacttttaactgttttcaatctagccattacaaatcttaaagcaagtgttaaacttgtaaccaaatgtaaaaatatatattaaaatgttgtttttgggtttttttgaagtttagatttgatagtaaagttgtacatttcgctgttattgcatagatttaaaaaatcatacaaattataataattcattgatttttaatcattttaattattatatgttatgttttgattttattttttcttaaaatttgagacgtggcattaacctggacagcacaaagacaaaaaaaacgaagtgtgtcacgtcttgtgcgtattgccccacatgggaagcataagaacatccccatggcggcataacacacaccaacacttcattttttaggtgcgcgatacactatcttctgtggccaaaaatcaattataaaaaatcacatggctatcgttttattagcactttggtatgagcttaaataacaaaataccacgcgtgggtgagttattaaaaatgtttccacggacatactcttcatcgtaacgacgcgttaacaaaaaacgcatgtcgctaacaaggtaatagataattttcgctatgtacgaccaggtccagggtgacagcatgaaaaacaaattgttatttatgatgttgacaatactgggtgcgcctgggattgcaaccgcgacaaattatgatctggctcgttcagagtataattttgcggtaaatgaattaagcaagtcttcatttaatcaggcggccattattggtcaagtcggcacggataatagtgccagagtacgccaggaaggatcaaaactattgtccgttatttcacaagaaggaggaaataatcgggcgaaagtcgaccaggcagggaattataactttgcgtatattgagcaaacgggcaatgccaacgatgccagtatatcgcaaagcgcttacggtaatagtgcggctattatccagaaaggttctggaaataaggccaatattacccagtacggtacgcagaaaacagcagttgtagtgcagaaacagtcgcatatggctattcgcgtcacccaacgctaataccgttacgacttttaaatcaatccgatgggggttttaccatgaaacttttaaaagtggcagcattcgcagcaatcgtagtttctggcagtgctctggctggcgtcgttccacaatggggcggcggcggtaatcataacggcggcggcaatagttccggcccggattccacgttgagcatttatcagtacggttccgctaacgctgcgcttgctctgcaaagcgatgcccgtaaatctgaaacgaccattacccagagcggttatggtaacggcgccgatgtaggccagggtgcggataacagtactattgaactgactcagaatggtttcagaaacaatgccaccatcgaccagtggaacgctaaaaactccgatattactgtcggtcaatacggcggtaataacgccgcgctggttaatcagaccgcatctgattccagcgtaatggtgcgtcaggttggttttggcaacaacgccacggctaaccagtattaatttagcgtctgcgctaataaaaaaacagggcataagccctgttttttttcgggaggaaattatgcatactttattgctccttgccgcactttcaaatcagattacgtttaccacgactcagcaaggcgatatttacacggtgatccctcaggtcacattaaacgaaccctgcgtctgtcaggtgcaaattctctctgtgcgcgacggcgtcgggggacaaagccatacacagcaaaaacaaacgctatctttacctgctaatcaaccgattgagttgtctcgtcttagtgtaaatatatcttcagaggactcggttaaaattattgttactgtttcggacggacaatcactgcatttatcacaacaatggccgccttctgcacagtagtttttgatggtggcggaaatggattggctgacctgggtataaagaggcgataaaagcgtctcatcgtctcggcatgtcgctataaggtaacgccgaaccctcgaggatgactaatcattgaggagttaacatgtccgtaatcaagaaaaatatccctgccataggcctgtgtatctgcgctttttttatccattctgcggtagggcaacaaacggtacagggcggcgttatccattttcgcggcgcgattgttgagccactgtgcgatatttctactcacgccgaaaatattgatttaacctgcctacgcgaaggtaaaaagcaaatgcaccggattgaccttcggcaggcatctggattaccgcaggatattcagtccattgcgacggtacggctgcattatctcgatgcgcaaaaaagcctggcggtgatgaatattgagtaccgttaacggcggtgtcatagatataaaaagagcgactctgttgaaagccctgctgtacactttgcagataaggtgagacaaaggggggggggttatgacatcacgtcttcaggtcatacagggtgatatcactcaacttagcgtcgatgcgattgtgaatgccgctaacgcatcattaatgggcggcggtggcgtagacggcgcgattcatcgcgcggcggggccggcattgctggacgcctgtaaactcatccgtcagcaacagggcgaatgtcagacgggacatgcggttatcacgcctgctggcaagctttcggcaaaggcggttattcacacagtggggcccgtctggcgaggcggcgaacaccaggaagctgagctactcgaagaggcataccggaattgtttgctgcttgccgaggcgaatcactttcgttccatcgcttttccggcaatcagtaccggcgtttatggctatccacgcgcccaggccgctgaagtcgccgtcaggacggtttcagattttattacccgttacgctctgcctgaacaggtatactttgtctgttatgatgaagaaactgcccggctttacgcaagattacttactcagcaaggcgacgaccctgcctgataaaacacgcctggagcgtgccgttgaaccgctatgcgcgcgccatcccggagagtgcggcattctcgcgctggataacagtctggacgcttttgccgcccgctaccgcctgaccgaaatggcggcgcggacgctggatgtgcagtattatatttgggaagacgatatgtccgggcggctgctcttttcggtactgctgtcggcggcgaagcgcggcgttcatgttcgtctgctgctggatgataacaatacgcctggtctggatgatacgttgcgcttgctggatagccatcctaatatcgaagttcgtctgtttaatcctttctcttttcgtacgctacgcgcgctgggatatttgacggattttgcgcggctgaatcggcggatgcacaataaaagttacactgccgacggcgtagtgacgctggtcggtgggcgcaacatcggcgatgcctatttcggcgctggcgaggagccgctattttccgatctggacgtgatggccattggcccggtggtcaatgatgtcgccaatgattttgaacgttactggcgctgtagttcagtgtcgacattgcagcaagtattatccctttctgagcaggaactgacgcagcgtatcgaacttcccgaatcctggtataacgatgagatcacccgccgttatctgcataagctggaaaccagccagtttatggcggatctcgatcgcggaacgttgccgctgatttgggcaaaaacacgcttgcttagcgatgacccttctaaaggcgaggggaaggcgcagcgccattcgcttcttccgcagcgattatttgacgtgatggggtcgccgacggagcgtatcgacattatttccgcttactttgtccctacgcgcgcaggcgtggcgcagttgcttaatctggtcaggaaaggcgtgaagatcgccatcttaactaactctctggcggccaacgatgtggcggtcgttcacgcagggtacgcgcgctggcgcaagaaattactgcgctatggcgtggagctctacgaactgaaaccgacccgcgaacatgaaaccgccgtacatgatcgcggactcaccgggaactcaggttccagcttacatgctaaaacgttcagtattgatggtagtaaggtgtttatcgggtcgcttaattttgatccccgttcaacgcttttaaataccgaaatgggctttgtcattgaaagtgaaacgctggcgacgcttatccataagcgttttacacagagccaacgcgatgcggcctggcaactgcggctggatcgctggggacgaattaactggatcgatcgtcagcaagaagaggaaaaggtgttaaagaaagaacccgctacgcgtttctggcaacgagttctggtacggttggcggcaattttacctgtggaatggttgctgtgaacccacgcgcggaaaactacccgatcgtggcgcgactttctcgttttaccggcggtttacctgaaaagagaaatttcaggagcgggatgcgtaaatgaatttcatacagaattaacgcaatacccataacaaatatcagcccgcacaagaacccgatcaggttggaggagatatgcggcgtaatatacgcgccaaagaaaagcgttaagggatgatgcaccagatagataaacagcgaagcattcacgaaataggtgacacgcgcggactgaaagtttaacaagcgatgccccagtgaaaataccacgttcaccatccatagccccattaccatcgtaatcacggattcggtttcgtacatccaggcgtcgccgctcccataacgttgattcagcagatacgcgataaaagcaacggcagcgcctaaagtgcatccgcgtgagggcgtggtgaagcgcgctttcagatcggggtgaatgaaggccaacgcgccgagaataaaaaacggcacataaaatagcgtttgcatcacaataaaattgaacatgccgtcactgaggattgccggatatacgatgaatataatgcgcctgatagcagcgtaagccacccccagcaggaaaaaaataagcgaaagtttggccagcgaaatagcggcgggacgaggcttgcttgtttcctgccttttttggaaccaggtaaaaatcccgatgctgacggtggttaatatcaccagcaccagtaaaaaccacagatgtgaaatgagttcccacgctaacgtattatatttttcataggcagagagtgtaggccagttctctgttttctctttgacatattgcaacaggataaattgcggcaaggtaagcaaagggattgcggtaagcatgggaatacccacacgttctacccgtactttccaccagtgttttaatggataacgtaaaaataacatgtacgaaaaataaccagaaataacaaaaaacacctgcatacgaaaagcgtggataaaatcgttaaacagggttagccaccacgatggcgcggcgctattgacatgccaactgtgagtggaatagatcaacgagatatgaaagggaatccctaacaacatcagccatgcgcggatagagtcaagaaaatattcacgcggcgcgggtacagagctcatataaggtcacgtattctcagatttttcaccttatccataaggcgaattatagttacattcggtagcaaccctacaccaactccgacaacctgtctccaggataagcacgcaaagtgaaaacaggcgcgggaggtgcttaatccatgagccagcgcgctgaacaaagcctggattcagttgtcgtaatgcctgattatccattaaaatggatcggatcgatataagcacacaaagggggaagtgcttacttattatgaaacataaacgacaaatgatgaaaatgcgttggttgggcgcagctattatgttaacgctctacgcatcatcgagctgggcgttcagcattgatgacgtggcaaaacaagctcaatctttagccgggaaaggctatgaggcgcctaaaagcaacttgccctccgttttccgcgacatgaaatatgcggattatcagcagatccagtttaacagcgataaagcctactggaacaacttaaagaccccttttaagctcgaattttaccatcaggggatgtacttcgatacgccggtcaagattaacgaagtgacggcgacgacggtcaaaagaatcaaatacagcccggattacttcaattttggcaatgttcagcacgataaagacacggtaaaagatttaggcttcgccgggttcaaagtcctgtaccccattaacagtaaagataagaacgacgaaatcgtcagtatgcttggcgccagctatttccgcgttatcggcgcaggccaggtatatggcttatctgcgcgcggcctggcgattgataccgccttaccatctggtgaagagtttccccgctttcgcgagttctggattgagcgtccaaaacccaccgataagcgtttgaccgtctatgcattactcgattctccgcgcgcgaccggcgcttaccgttttgtgatcattcctggccgcgataccgtggtggacgtgcagtcaaaagtctatctgcgcgataaagtgggcaagctgggcgttgcgccattaaccagtatgttcctgtttgggccaaaccagccgtcgccgacgaccaactatcgtccggaactgcatgactcgaacggcttatccattcatgcgggtaatggcgagtggatttggcgtccgctgaacaatccaaaacacctcgctgtgagcagctatgcaatggaaaaccctcagggattcggcctgttgcagcgtggtcgcgagttctcgcgctttgaagatttagacgatcgctacgacctgcgtccaagcgcctggattaccccgaaaggcgactggggcaaaggtaaggttgaactggttgaaattccgaccaatgatgaaaccaacgataacatcgtcgcttactggactccggatcaactgccggaaccgggtaaagagatgaacttcaagtacactctgaccttcagccgcgatgaagataaacttcatgcgccggataatgcctgggtgctgcaaacacgccgctcaacgggcgacgttaaacagtcaaatctgattcgccagcccgacggcactattgcctttgtggtggatttcgttggcgccgacatgaaaaaactgccgccggatacgcccgtcgctgcgcaaaccagcattggcgataacggtgaaatcgttgacagtaatgtacgctataacccagtcactaaaggctggcgtttaatgctgcgcgtgaaagtcaaagacgcgaagaaaaccacggaaatgcgtgccgcattggtgaatgccgatcagacgctaagtgaaacctggagctaccagttaactgccaatgaataaaacaactgagtatattgacgcattgctgctttctgaacgtgagaaagcggcattgccgaaaactgacatccgcgccgtgcatcaggcgctggatgccgagcatcggacttactcgcgagaagacgattcaccgcagggttccgtaaaagcccgccttgaacacgcctggccggattcattggcgaaggggcagttaattaaagatgatgaagggcgcgatcagttgcaggctatgccaaaagcgacgcgctcttcgatgtttcccgatccctggcgaaccaacccggttggccgtttctgggatcgtctgcgtgggcgggatgtaacgccgcgctatgtttctcgtctgacaaaagaagagcaggcgagcgagcaaaaatggcgtaccgtcggcactatacgccgctatattttgttaattttgactctggcgcaaaccgtcgtcgcgacctggtatatgaagaccattctgccttatcagggatgggcgctcatcaatcctatggatatggtggggcaggatatttgggtctcctttatgcagctcctgccctacatgctgcaaaccggtatcctgattttgtttgccgtgctgttctgctgggtgtcagccggattctggacggcgctgatgggcttcctgcaactgcttatcgggcgcgataagtacagcatctccgcgtctacggttggcgatgagcccctcaatccggaacaccggacggcgctgatcatgcctatctgtaatgaagacgttagtcgcgttttcgccggtctgcgcgcgacctgggagtccgttaaagccacaggcaacgccgcgcatttcgacgtctatatccttagcgacagttataacccggatatctgcgtggcggagcaaaaggcgtggatggagcttatcgcggaagtgcagggcgaaggccaaattttttaccgtcgccgccgccgccgtatgaaacgcaaaagcggcaatattgacgatttttgccgccgctggggcaatcagtacagctatatggtggtgctggacgcggactcagtgatgagcggcgagtgtctgagcggcttggtgcgcctgatggaagcgaatccaaacgccgggattatccagtcttcgccgaaagcgtcggggatggatactctgtatgcccgctgccaacagttcgcgacccgcgtctatgggccgctgtttaccgccgggctgcacttctggcagttgggggagtcgcactactgggggcacaatgccattatccgcgtgaagccgtttatcgagcactgcgctctggcgccgctgccgggagaaggttcgttcgccggatcgattctttcccacgactttgtggaggcggcgctaatgcgtcgggcagggtggggcgtctggattgcctacgatctccccggctcctatgaagagctgccgccaaacctgctggatgagcttaaacgcgaccgccgctggtgtcacggcaacctgatgaactttcgtctgttcctggtgaaaggaatgcacccggtgcatcgcgccgtgttcctgacgggggtaatgtcatatctgtccgcgccgttatggtttatgttcctcgcgctttctaccgcgctgcaggtcgttcatgcgttaacagagccgcaatatttccttcagccgcgccagctttttccggtctggccgcagtggcgtccggaactggcaatcgcgctgtttgcatcaacgatggtgctgctgttcctgccgaagctgctcagtattatgctgatctggtgtaaaggcaccaaagagtatggcggtttctggcgcgttacgctgtcgctgttgctggaagtgctgttctccgtattgctggcgccggtgcgtatgctgtttcataccgtgtttgtggtcagcgcgtttctcggctgggaagtggtctggaactcaccgcaacgcgacgatgattctacgccgtggggagaagcctttatgcgtcacggctctcaactgctgctggggctggtctgggcggtgggtatggcgtggctggatttacgctttctgttctggctggcgccgattgtcttttcgctgattctgtcgccatttgtttcggtgatctccagtcgttcaacggtaggattacgcaccaaacgctggaagctgttcctgatcccggaagagtattcgccgcctcaggtgttggtcgataccgataaatatctggagatgaatcgccgccgtattctggacgatggctttatgcatgcggtatttaacccgtcgcttaatgcgctggcgaccgcgatggccactgcgcgtcaccgcgccagtaaggtactggaaatagcccgcgatcgtcatgtggagcaggcgctaaacgaaacgccggagaaactgaaccgcgatcggcgtctggttttgctcagcgatccggtgacgatggcgcgtttacactatcgggtctggaatgcgccagagagatactcttcctgggtaaaccattatcagtctctcgtcctgaatccgcaggcgttgcagggacgaacatcgtcagcgagataaggtcttcaggtctggagtgaggtgaaaaataccggcgtgatgccggtatttttatagtgaaatgaggtatcaggtgcgtatattcgcggtgagcataatggtgattaccctgagcggctgcggcagtattatcagcagaacgatccccggacaaggacacggcaaccagtattaccctggcgtgcagtgggatatgcgtgattccgcatggcgctatatcactatcctcgatctgcccttctcactgatcttcgatacactgctactgccgctcgatattcaccacgggccttatgagtaattaacgctcatcccattcgtctgccgcagtacggccttcctcggtatcaagcgggggttcaagctggaattccccttcatcccattcatgcaaagtattctcttcctgccactcctggcggatctctatctcatcataatcgccgtcaaacacgctctgcgcggcttcaccactcagcatcggcagacattcgccatcttcaccttcatcggcgaaaaattcgacctgccacatgatgtccccatcctgcagtacatatttctgaacgttgaactgctgcacattcgcttcgtcttgttcgaggcctggatggtcagccagaaattcttcccgggctgcatcgatagcttcttccagcgtggcatacatggtcatcagtgtctccctttgatttgatgaggtatttagggaaagaatagctgattctgtaatattgcaagtatgaaagcgcaaaaattattctattgccagtctgcgccgtcgtaagctgttccatgaatagatagcattgaacaacaccacgcctgccgtgacgcagaatacggcgcggaagccatagctcgcggaaattgcggcgcccatgagagggccggtgacgttgccgatatcgcggaaagattggttgtaactgaatatgcgcccggctatctggttggtagagttgtaaaccagcagagtttgaacggctggcagcagcgcgccatccgccgcgccaagcagaaaccgcaatagcgcgagctgccacggcgtttgcacaaaagacattggaatcagcagcagtacggaaataatcagcgcgacgataagaatcttttccgggccaattctgtcgccaagcttgccgagccggggggcgctaagtaatgccgccacgccgggaacggacgctatcatcccgctaatgaacgcaatattactgacatctcccgccagttcgcgcacatagagcgtcaggatgggcgcaatagaccccgtcgccacctgaataatcagcgtggtgacaaacaggcttaataccaggcggggattttttaacgaggcgaccacttcccgaacgtgaagcatctcttttttgctcaccggcaggaaattctcgcgaatgaaaaagaaggtgagcagaaaacagataaacaaaacgctggcggtaataaaaaagaccggacgaaggccgtaatggtcggcgagcagaccgcccgcaagtgggccaagcagagcgccgctgacgccgccagtagagagcgtccctaacgcccagccgcttttgtggcgcggcacctgagtggcgatgagcgcattggcgttgggaataaatccgcccagcaggcctaataacgcgcggaggatcagaaattgccagatattttgcgccatgcccattaacagcatcacaatggccatgccgagagcggaacgcaacagcatgatcttacgccctttacgatccgccagaccgccccaaaaaggggacgcgatagctgaaaagaggaacgtaatactaaagaccagcccggaccacatgttgagcgcgctatggcctgttacgccgagttgctcaacgtagagagggagaaaaggcatgaccaggctgaatgccgcgccggttaaaaaacagcccagccaggtaacggttagattgcgtttccagtttatggggacatcagagggtgacatagcgttccacagtatgatgcgcggtttgcgctatcatcaatttaattatgagcgtactaattataattatgcgccgaccttaccagcctcgcaatgtggggagcttttaaagctaaaagaggggaaaaattgcagcctgacggctgcaatcctgtcaatagcgcgacggtacgccttcagggcgagttttaaagcggcgatgcagccacatatactgctctggcgccatcataatgcactgctcaacaatcttattcatccatgcggcagtcgcttctgcgctctccagcggaggcgaatattccgcaggaagaatgatcagttcgtagcctttcccatcgggtttacggcgaggcacgaaggggataatacaggctttagacatgcgcgcgagcatccaggtaccggaggtcgtggcagcctggtcgacagcgaataatggtacaaaaacgctggcgcgcgggccataatcgtgatccggcgcataccagatcaattcgccgcttttcaatgccttaaccatgcctttcagatctttgcgatccaacattgatttattggagcgtaagcgtccccaggtctgtaaccagtcgagcaacggattatcattcgggcgataaactccgatacccgggttatgcataccaaacatgcgggcgccaaactcaagggtaaggaaatgtattcctaccagaatgaaccccagtccctgcgccttaacttcacggatatgctccagaccgctcgcttccatccagcggttcactcgccgatcgggccagaaccaggccatgccggtttccatcacgcccataccgacggattcaaagtttttgaccaccatggtgtggcgttcctgcgcgctcatttccggaaagcataattcaaggttgcgataggcgatttttgcgcggcgtttcattacgcgtcgcgccaggtggcccaatgcgcaacccaatttatagatgaccgggtaggggagttgcacgaccaaccaaagcgcgcctatacccaaccaggttaaccaatagcgcgggtgcagtaaggccacggagaacttaggcaacttcgtcatttctatcctgtccttcaacgaacaattccccgtattctcgcatctttttgcgttgagcaaaaatatgtagcaggagagtggcgattaaatcgacaattgttgttaattatttagtgtaaagcaggaaatgtagcgcaaaatgtgtggatgtaaattggcgagacttgccttatcatgcctgcccactttattttttgctgattgcaggatacgtacaccatgccagtgttacacaaccgcatctctaatgacgagctgaaagccaaaatgctggcggaaagcgagccgcgtacgacaatttctttttataaatatttcactatcgcctctccgcaacagacgcgggacgcgttgtatcaggtgtttacggcgttggacgtttttggtcgcgtttacctggcgcatgaaggcatcaatgcgcaaatcagcgtgccgcaaagcaagctcgagacgtttcgtcaacagctttatacgttcgaccccgcgctggacggggtgcgtttaaatatcgcgctggaggatgacggaaagtcattttgggtgctgcgtatgaaagttcgcgaccgtatcgttgctgacggtattgacgatccgacttttgacgccagtaatgtcggcgattatctgaaggcggcagatgtgaatgcgatgctggacgatcctgacgcggtctttattgatatgcgcaaccactatgagtatgaagtcggccatttcgaaaatgctctggaaatcccggcggatacgtttcgtgaacagttgccaaaagcggttgaaatgctgcgggaacatgcagataaaaagatagtgatgtactgtaccggcggtattcgttgtgagaaagccagcgcctggatgaaacacaacggtttcaataaagtctggcatattgagggtggcatcattgagtacgcccgtcgcgcgcgcgcgcaggggcttcccgttcgctttatcggcaaaaactttgtatttgatgagcgaatgggcgaacgaatctcggatgaggttatcgcgcattgccatcagtgcggcgcgtcctgcgatagccataccaactgcaaaaatgacggttgccatctgctgtttatccagtgtccgcagtgcgccagtaaatttaacggctgctgtagtgaacaatgctgtgaagagttggccttgccggaggaagaacagcgccgacgtcgcgcgggtcgcgagaacggcaacaaaatttttaataaatcgcgtggtcggcttaatagcaaactgagcattcccgatccggctgagtaatattttgccggatagcggcgtaaaggccgctatccggcatttcgccaggcgttacttctgctgaacgccttctactgagatgataagctcaacctcttgtgaggccgggccgagatcggtagttatattgaaatccttcagcttaatttttccttcggcctcaaagcccgcgcgcttaccgccccacggatcgtcgccctggcccatcagcttcgcttccagcgtcaccggtttagtcacgccattgagcgtcagattgccggtaatatccagttcatcgccctcttttttcacgctggtagaggtgaaggttgcctgcgggaatttcgcaacattaagaaattccgcgctacgcaggtgtttgtcacgttcggcatggttagtgtcgacgctattggtgttaatggtcacgttcactttgtctgccgacggatttttttcgtcaaaagtgaacgtgccgtcgaaatctttaaaggtgccgtatagccagctgtagcccagatgctgaatgcggaaattgacgaacgcatgttggccttctttatcaattttatactccgccgccacggcggaaccggtcgtgaataacaaggatgcgagggtgaatcccagcaggttttttttcatttttgagctccatagtcagatgacgacattcctgtcatacgtttcagagtgtcgtctttatcgatgaaatggtgttttagcgccataaccccatgcgagagcgagataatgaccagcgaccaggcaaaccacagatgcagtgttccggcgatgtcagcctgcgcgcccgcgtccgtaagcgtggccggaatctcaaaccagccaaagacgctaatcggtttaccgtcggcggtggaaatcaggtagccgctaatgattatcgcaaagagcaggagataaaggaggagatgacctgcggcggcgccaatgcgcgttaaacgggaatagctggtcaacgcaacgggcggcggcgaataaagccgccagataatacgcacgatcagcgccatcatcagtaatatgccaatacttttatgtatttccggcgcctggtgataccagccgtcgtaataactgagcgtgaccatccataagcccaacgcaaacatgccatagaccaccagggcggtcagccagtggagcgcggcggaaaccacgccataacgctgtggagtatttttaaattgcataaacacaccaatgaatatttcacgagagaatgaaaatggcgtggaaaagcgccgaatgcaacttataaataagaatttgaatgatatttatttttatttcaataattttgatgttgtttgcggttcagcttcagaagtttcgagatatttccccctgataaccgcgcaacggcaagaactggcattattgccgtgcttcaacgttatgaaataaaaagtgaggaattttcaggaagtgtcagttaacgtcaatgaaaagcaatcagaagaaaaggagataaacaatatccatcaccgccagcagcgaccaaagaataacgtaaagcatgaaatgttcgcgaatattattcatcagaaaatgaaagagacgacgcatagcttaccttaataaacagcccctttacggggccgacaaattattggctaaaacgggaaagccggaacggcgtcagatcaaaggagggcgtttttcccaacgcaaaatccgcagcgatttctcctaacaccggggcgaatttaaaaccatgtccgctgagtccagtgatgacaagcgtgttctcatggccaggcagcgtatcgataataaaatcctcgtccggcgaattatcataggtacatgccgccccatgtaaacaaccgccgatacccggcagtacgttacgcaggaaaggaaatgcttccgcgccatcgctggcaacggcggcaaagggcttgcgctcttccggagcttgtattagctgtccgccattgtgtttgccgatttttaactcgtcgttctccgccgggaagccgtaatattgatcgccgttgggcatttcgccggtaaaggccggaaagcggtttttagtgctgtaacgcccatccgccttaaaccaggcaaaaactttacgtacgggctgaacgggcagctccggtaccagcgctttgacccaggtgcccgcgctaatcagcgccttgctggcgtggtagcagccttcactcgtctctatcgtcacaccgttatcatcatggtgaatatggcttaccgggctgttaaatagctgtgcgcagcctgcctctcgggccagacgaagccatgtggtaatggctaattcgctgcgcaggaaaccggagtcagcttcaaacagcccgatataattatcgggcacgcgaatttccggccagcgcgtcatgagggccgtcgcgtccaggcgctcgacgttcaattgccactgttgcgcgcttcgtgcgacgttggctaagaaagcggaatcggccgggccgaggttgacgacgccggagcggacaaaaataggctcttcattgtgtgtggagagttcatcccaaagcgtctgggcgcgaagcaccagcgggacatatttttcgccttcaccataagcgtggcggataagacgggtatcgccgtggtggctgccctgttgatgaggcggcatatgcgcatcggtcatcaggacctttagcccggcgcgggtggcgtaataaccagcggcggcgccaaccgaaccgctgccgataataataaggtcgtatttcatcagcttctctctgctatcgcgatgatttcagggtaaataactgcgctgagatatacaagccagaaataagtgaggcaccttacggtgcctgagagagggggagcgcgtcacgctaatggcgacgatactcgttttcctggtaatcgcctgattctattttggcgatgccggcttctaatattgaaataaattgcctggctacatctgttgttaaccagagcgtttgaccaacttcagtcccttccggttccggacgatttggggtctggtagtgtaaacgcagcatcagcgcatcatagctatcgacggtgctgatgtcccatcctacaagcggatgggtctgaatgacttcattattcttttccatcatgcccccctggtacgtgttataagacaacggttctcgaggttcaatgcgtgtttttcttctgaagcaacttcagtataccaattaataaggctattcactgcgtttttaaagagaccggaggataaatttctctttttaagaattatatgaacaataaagcggcagttcattcatatttttttaggatgttgtgcaattattttgagggtcaggtgaaatattcatcagttgcgcaaataaaaaagccggggcgacccggcaaacatacatcactgcatatcattttttattcattgatgaaccagtcatcagcgctctcccaggtctcctggagaatctcgctaatgcgttctttgtcctcttttgatgcgccaatgacggacaagttgttggcggtagcgtaacgcacggtgacgttacccaaattctccggaaaatgatggctaatacggcgggagagttcgcccgccagcgcatcaatcgcaccggcaggcagaggtgacgttttggctatagtgacttcaatacgcataatggccccctgttgaatatactggatatatatacagttaaatccagtatatagcaacaggtaagcgcattttttatttttttactgaccagcgtactgtttcacccgctaaaaaaggcaccagagaatcatcagccagcgcgatatttcccggtatctgttgttcatcgcgaaccagttccacccaccccgtattcatcggcaggccatagaattgcgggccattcagtgaacagaacgcttcaaagtgcgccagcgcgttcatttcctcaaacacggcggcataactgccaagggcggagggggcgttgaaacaaccggcgcagccgcaactggtctctttacgatgacgtgaatgcggcgctgaatccgtccccaggaaggcgcgcgtaaaaccactggcaaccagttcgcgtaacgcctgctggtgaatattgcgtttcagaatcggcagacagtacaggtgaggacgaatgccgccgaccagcatatcattacggttaaacattaaatgttgaggcgtaatggtagccgccaggtagtcgttgccgtcacgtacatactgcgcggcatctttggtcgtgatgtgctcaaagaccactttaagcgcggtcagacgctggcgtagcggttccattacggtgtcgataaaacgcgcttcacgatcgaatatatcaacatccgcatgggtcacctccccgtggaccagcaatggtattccgagtttttccatccgctccagtaccggcatgatagcgtcgactgacgttacgccatgactggagttagtggtggcattggccgggtaaagcttagccgcagtaaatacgccttcatggaaaccacgctccagttcatcggcatcgagcgaatccgttaaatagcaggtcattaacggcgtgaaatcatgcccggcgggcaccgcatcgagaatacgctggcggtaggcgatcgctgcatcaacggtcgtgatgggggacgccaggttcggcatcacgatagcgcgaccataaatttcgctggtatagggtacgaccgtttttaacatgtcgccatcgcgaaggtgaacgtgccagtcgtccgggcggcggatctttaaaacctgggatggtgcagtcattaataagctccggctgaggaatagtctttttgccggaaacaaaggataagcggaaacgttttcgtttgcacgtaaaaaaaagggcgcgagcgcgccctccgaaatcaattggtgaaaggaataacgatttcaccaggtttaacttcaatgcctttcgcgagtttctttgctaacgcttcgcctttactgctgtcctcacgcaacacgtaagcgggccgctggttaaagtagctacgtaaagactgatttaaataaggcaggagcgtttgtagcaccgattgcattttctccggcgtcacggtggcgtctactacttccatctcctgaagatagatggcgcctttttctttatcaaagaccggcagggcttttagcttgagtttcatcgtcgctttttgactgccaaacagggaattcatatccagcctggcatcgccagtaagggtgactttattaggttcttcccgaccaatctggctgacaaggttagtcaatacgatatgcgcgtcggcaatgccgggcagaccaatatcttttgagaaattattccgtttttcaagcgcttgattgatttcttgttcgctaatggtgtattgcgtaagttgattacaacccactaacaggccgctaactaccagcgcagcggcaaaaaaaaactttttcatggcgttccttagcatgttgcctgtaccctaatcttgacacaaagcagcatgtcgcgccagcggacatggtgccactagaaaaagctgaaaaaggcggcaagaaagggttgccgcctggcgggagttagatagccattgaggagagtaaattaatttgcgtctgctttgccatattatcgcgatagtccgcgacttttgtcggccagtggataccggcgaccagcgtcagattacgcagaagcggaaacagatgaatatcatcttccgataattcgccgttaacggcgttaggctgtacgatgagtttatccagcaaacgtaaatcatcgccgatctttttaatcagtcctgcagagtgcgcaagatggttgtcaaaactgccagatgaggcttcttttttgcggataaaatactgacgcgccgcaggggtagaaaattcatcgaaagcggattttgcaaatcgcggcagcagtagctgattaacgtaaccgttaactttgcgcaaccactcttcaatggctggattgcgtttcccggttaacagcggtttgccgtcgaggttgtcgacataatgtacaatatccatactttcaggaaggtagcgactatcatctttttgcaggatgggcaccatcttttgaccaatcatccgggtgggcgtcgcctcgtcgtcattttgtaacacgttaagttcaacggggatgttcttcaggccgaaaatcatgcgggctttaacgcagaaagggcaatgatcgtaaatataaagcttcacgtttctcctccatttgactgtcggtatctgaccagtatggaggagatagcgacaggtatcaaatcaggcgccgggttccagcatccggcgcggcgtgcgtttatgactaaattgccagcctaaagccaaaaaggtgataaagccgataataccgagcatcatccacggtagttcaggctgcgcaagcgctttccccatatcaaacaaccagccgccgccgatataaccaatcgcgccgccaatggctaatcccagacggctaaagcccatatagcttccccgcgccctcgcgtctgcgagcgacgcgctgagcgtttcgcgcgccggttcggcgataaccgagccgatgtagaaagcgcaaataagcgtaaaaagctgctgtaaattgcccaccatcccgatggggagcatgctcagcgacatgacgagcaaaccggccatcagccgatgctccagccgaaaacgcttttcgctccagcgggcaatcgggtagagcaacgtcagcgagagacacgcctcaatagcgtacatccatttcacggcagcaggcgaaccggcgatatcgtttaccataatcggcagcattaacatgacctgtaccgccagcatatagtagcccgccagcgtcagcacgtaggttacaaaccttttatcgctcatgacgcggcgcattccttcacgcaccggcgttctgaccgttgatagcttccaggccggaagcagccatgcgttgaaaagggcgcataatatgaacaaaatagcgcccgtcgcgcagaccaggcgaaaatcgtattgtagcaaccagcttcccagcagcgcgccaatcaccgcacccgcgctgtcctgcatcatcaacagagagaagaagcggccccgttgctccggacgaattaatttgaccaccagcgctgaacgcggcgggtcgaaaagcgtaccgccgagaccggaaagaaagcaggaaaaccacaagagccagggctcatgcgcgatacccatggtggcaaagcctgcggcgcgcatcagcataccggtgacaatcatcggtttcgcgccaaagcgatcggcgatggcgccgccaaaaatgcccagaccttgttgaataaactggcgcaggccgagcgcgatccctaccattacggcagcccaccccatttgatcgacaaagcgaatagagatgagcgggaagacgacgaaaaaacccagcaccaccaacatgttatcgatgagaagaaaatatttacccaggttcctcgcctgcgagacgcgcgacatttcccctcccgggaaataaaagatgagcgtcttctattctgcggcggcgtttcgttttttcctaccgttagcgggacaatatttttttatcaaaagtcctttttaatcgagagttttcatcaaaatgtggcagcaattcaaaaaatgacgatttgcgcttttcacagagcctggttgcgcaggtatagtaatgttactggcgtgctgaagacgttacaggaaggagtaggtatagaatgtttggctatcgtagtaacgtgccaaaagtgcgcttaaccaccgatcgtctggtggtacgtttagtgcatgagcgtgatgcctggcgtctggccgattattacgcggaaaatcgtcattttttaaaaccctgggaaccggtccgtgatgaaagtcattgttatccttcaggatggcaggcgcgtctgggaatgatcggtgaatttcacaaacagggctccgccttctatttcgcgctacttgatccggaagaaaaagaaattatcggcgtggcgaatttttccaatgtggtgcgcggttcttttcatgcctgttatctgggctattccattgcgcagaagtggcaggggcaagggctgatgtttgaagccttaaccgctgcgattcgctatatgcagcgcactcagcatatccaccgtatcatggcgaactatatgccgcacaacaaacgtagcggcgcgttgctggcgcggcttggctttgaaaaagaaggctatgcgaaagattacctgttgattgatggacaatggcgcgaccatgtcctgacggcgttaaccacgccgttatggacgccggggcgttgagcggcttacggaatgagaggcaaagggagaaaacgatgaaatatgaattaaccgccactgaagcgcgagtgattggctgtctgctggaaaagcaggtgacaacgccggaacagtatccgctttccgtcaacggcgtggtgacagcctgtaatcagaaaaccaaccgtgaaccggtgatgaacctgacggaacaagaggtacaagaacagctcgataacctggtgaaacgccactttttgcgtacggtcagcgggtttggcaaccgcgtcaccaaatatgaacagcgtttctgtaattccgaatttggcgatctgaaacttagcgcggcggaagtggcgctcgtcactacgctgctgctgcgtggcgcgcaaacgcccggcgagttgcgtagccgggcgtcgcggatgcatgaattcagcgatatggcggaagttgaatccacgctggaacggcttgccagtcgtgaggacggcccgtatgtcgtccgtctggcgcgtgaaccgggtaagcgcgaaagccgctatatgcaccttttttgcggcgacgtcgatgaactgtctctccagacgtctgcgccggaaagtgcgtcgggcgatcttcagtcgcgcgtcgaagcgctggaaagcgaagtggcggagttaaagcagcggctggattctttgttagctcacctgggagagtaatgtgagaacattacggattggcattgtcgggttaggcggtattgcgcagaaggcctggctgccggtattaaccaacaccgccggatggacgttacagggcgcctggtctccttcgcgggataaagccttacgtatttgcgaaagctggcgcataccgtatgtggattcgctggcgaatttagcgtccggctgcgatgcggtctttgtccactccagtaccgcaagccattatgccgtggtcagcgaacttctcaatgccggcgtccatgtctgcgtggataaaccgctggcggaaaatctacgtgatgccgaacggctggtggcgctggcggcgcaaaaaaaattgacgctgatggttggctttaatcgccgtttcgcgccgctgtaccgcgaactgaagacgcgcctcggcactgcggcgtcactacgtatggataaacatcgtaccgatagcgtcgggccgcacgacttacgttttactttgctcgatgactatctgcatgtcgtggataccgctctgtggctggcgggcggcgaggcgcgccttgccagcggcacgttgctcaccagcgagtccggcgaaatgtgctatgcggaacatcatttttccgccgacaaactacaaattaccaccagtatgcaccggcgcgccggaagtcagcgtgaatcggtccaggccgtcaccgacggcgggctatatgacgtgacggatatgcgtgaatggcgcgaagagcgcgggcagggtattctcatcaaacccattcctagttggcaaacgacgcttgaacagcgtggttttgtcggatgcgcgcggcatttcattgactgcgtacaaaatcagacggttccggaaacggcgggggagcaggcgattttggcccagcgcgtcgtggaggcgctgtggcgggacgccatcagcgaataaccctctgtaacatctggcggtagtaattcatcgtaatccaggtactataccctcaataattcgagttgcagaaaagctaacgcacatgcagctcgaagtatggcgggtatatatgcccactctacacaatacctcttttcacagtgaataatggcaaaccgtggggagtctgtaaggcctgataagacgttttaacgtcgccgtcaggcgcggtgatacagccggatacggcagaagttgcgttatccggtcgatggatcagccatgcaggagttttacgccagggtctggaatacaaaagaaatgaatttattgaaatcgctggctgccgtcagctcgatgactatgttttcacgcgtgttgggctttgcccgtgatgcgattgtcgccagaatttttggcgcagggatggcgaccgacgccttttttgtggcgtttaaactccctaatttactacgccggatctttgccgaaggcgctttttctcaggcctttgtgcctatcctggcggaatataagagcaagcagggtgaagaagcgacgcggatctttgtcgcttacgtttccggcctgttgacgctggcattggccgtcgtgacggtggccggtatgctggccgccccgtgggtgattatggtaaccgcgccgggttttgccgatactgcggataaattcgcgctgacgacgcaactgctgcggattacatttccctatattctgctgatctcgctggcttcactggttggcgccattctcaacacctggaatcgcttctctattcccgcttttgcgccgacatttcttaatatcagcatgatcggttttgcattattcgccgcgccatactttaatccgccggtgctggcgttagcctgggcagtcaccgttggcggcgtgctgcaactggtgtatcaacttccgtatttgaaaaagatcggtatgctggtgctgccgcgcattaactttcgcgacaccggggcgatgcgggtggtcaaacagatggggccggcgattttgggcgtttccgtcagtcagatctcccttatcatcaataccattttcgcctcgtttctggcctccggctcggtctcatggatgtactatgccgatcggttgatggagttcccgtccggcgtgctgggcgtggcgttggggaccatcttgttgccgtcattgtcgaaaagctttgccagcggcaatcatgatgagtactgccgcctgatggactgggggctgcgtttgtgctttttactggcgttgccgagcgcggtagcgttaggcattctggcgaagccgctgacggtctcgctgtttcagtacggtaaattcaccgcctttgatgcggcgatgacgcagcgggcgttaatcgcctattcggtggggctgattggcttgatcgtcgtaaaagtgctggctccgggcttctattctcgccaggatattaaaacgccggtgaaaatcgccatagtgacgttaatcatgacgcagttaatgaacctggcgtttattggaccgctgaaacacgccgggctgtcgctctctattggtttggcggcatgtctcaatgcgtcgctgctgtactggcaactgcgcaaacagaatatctttacgccacaaccgggctggatgtggttcctgatgcgtctgatcatttccgtactggtgatggccgccgtattgttcggcgtgttgcatattatgccggagtggtcgcaagggtcgatgctatggcgtttgctgcgtttgatggcggtagtgatcgcgggtatcgcggcctatttcgccgcgcttgccgtgctgggctttaaagtgaaagagtttgttcgccggacggcgtaaattcagtgcctgatagcgctgtgctatcaggcctacaaggcattcaggccggaaaggcgcaacgtcgccatccggcaatgattagatagaaatttttttaccgccgcggtgagagacggaagtctgaccgtcagccccgtacaaggtcggctcctggtgaggtttcagcacctccagcgcctgttgattacgctcgatttgcccttccagcagccagccgttgtgctggttgaggtcgcgaagatgctgcgttttttcggtaatcgcctgccagcgctctgcaatgtcatcgtttgcgctacgctgcgcattctgctccagacggcgctgttgttccagataatccagcgtcgccagcaacgagcttttttcttctgtaatacgctgtagctggctgccgttaatctggcctacggaaagctgttgttgctcggcgtccatcaccgtcttcaggtcattcaggacggtggtcatctggtcaagtatttctgacaaacgagtcatacgcttatttactctgtaagtagctctgcgcctcgcgaatgagcgagtctgctatttttcccgtatccatttttaactcaccgttacggatagccgtttttaatgcttcgacgcgttccatattaatgtcgctgacgcctggctgcatgagcttcgcttgcgcgtcgcttaacgttacgctggcgctcgtcgcggcggacgttttttcctgacgcgttttttgtaccggcgtgtcgctggtttcgcgcgtctggacagtgctaacgggtttcaaaggtgaggtacggtcaatgctcatttatttatcctcatcgagggttacgttgtagcggccagctaccatcatggttgaatatctcatcggcagccgcgacaaaatctttacacaattataggttaataagaatattcccatcagaatcgacggttccactcacgatttgacccgatgtcatgcgcacgcgcgcattttgcgcgacggcagcattattcatcgcctgaccttccgcattgacgctgaacccctcgccattggcgatgacctgtactcgttgccccgctttgacgcgccaggcctgacgtatcatcgtaagctgtaccggctgcccgggagcgagatcgcgcaaactgacggcatcctgaatctgacggatatccagtaccgtccgcggcggtaactgatccagcctgccacgttttagcgtgacgttggccggcgtcaattttccgccgcgcgcgatgggcgcggcaacggcgacataattgccggtcgcttgcacattcacctgcaaataacgtttttcattggcgcagcgcgccaccacattgacgttgccccacagcttcgcgctgcccgtcatgctgaaggctggctgttcgcagctcggtagcagattgggcgatgaacggagcgtgacaaccacctcgtcgctgaagccagccagacgctgggaaaaccacgtggtcagctgggcgttgatgtcctgcgccattgtcagggggctgaacagcaaagccgccacggcgaatcctcgttttaacgtttgcatggtacttccccctggttgatgtcatgacaggattctacccgtgtgaagcaagcatcaacgcaataaatagcgacgcattttgcgtttattccggcgataacgcgcgcgtgaaggcatttaagctgtcggctgaattttgccatttgcggaggagatatgctcgacaggctcgatgccgccttacgatttcagcaggaagcgctaaatctgcgcgcgcaacgtcaggaaatattagcggcgaatatcgccaatgccgatacgccggggtatcaggcgcgcgatattgattttgccagtgagttaaaaaaggtgatggtgcgtggacgggaagaaaccggcggcgtcgcgttaacgttgacttcctctcaccatattcccgcccaggcggtctcttctcccgcagtggatctgctttatcgcgtacccgatcagccttctttggatggtaataccgtagatatggacagggaacgtacgcagtttgcggataacagtctcaaatatcagatggggcttaccgttctgggtagccaactcaaaggcatgatgaatgtgctacagggaggaaactaattcgtggcgctgttaaacatttttgatattgccggatcggcgcttgccgcacagtccaaacggttgaacgttgcggccagtaacctggcgaatgcggatagcgtcaccggcccggacggacagccttatcgcgccaaacaggtggtttttcaggtggacgccgcgccgggtcaagccactggcggggtaaaggtcgccagcgtgattgaaagtcaggcaccggaaaagctggtttatgagccaggcaatccgctggcggacgctaatggttacgtcaaaatgcccaacgtcgatgtggtcggcgaaatggtcaacacgatgtcagcctcgcgcagctatcaggcaaatatcgaagtcctgaataccgtaaaaagcatgatgcttaaaacgctgacattaggccagtaaaggaggcgcgtatgtctattgccgtaaatatgaatgacccgaccaacacgggcgtcaaaacgacgaccggcagcggatcgatgaccggaagcaacgctgccgatctgcaaagcagtttcctgaccttactggtcgcgcaattgaagaaccaggacccgactaacccattacaaaataatgagttaacgacacagttggcgcaaatcagtaccgtgagcggcattgaaaaactgaatacgacgctgggggctatttccgggcaaatcgataatagtcagtccctacaggcgaccacgctgattggacatggcgttatggtgcctggcaccacaattctggcgggtaaaggcgcggaagaaggggccgtgacgtccacgacgccgtttggcgtggaattgcaacagcctgcggacaaagtgacggcaaccattaccgataaagatggccgggtggtacggacgctggagatcggtgagttgcgagccggggtacacacctttacctgggatggtaagcaaacggacggaacaacggtaccgaatggttcttacaacattgcgattaccgccagcaatggcgggacgcaactggtggcgcagccgctgcaattcgctctggtacagggcgtgacgaagggcagtaacggcaacctgttggatctgggtacctacggcaccaccacactcgacgaagttcggcaaataatctaagcccttacacttatcaggagtcagtcatgtctttttctcaagcggttagcggcctgaacgctgcggccaccaaccttgatgttatcggtaataacatcgccaactccgccacctatggctttaagtccggtacggcatcatttgccgatatgttcgccggttccaaagtggggctgggcgtaaaagtggcggggattacccaggattttaccgacggtacgacaacgaacaccgggcgcgggctggatgtcgcgattagccagaacggttttttccgcctggtagacagcaacggttccgtgttctatagccgcaacggccagttcaaactggacgagaaccgtaacctggtcaatatgcaggggatgcagttgaccggctatccggccaccggtacgccgccgaccattcagcagggggcgaatcctgcgccgatcaccattccgaacacgctgatggcggcgaaatcgaccaccaccgcgtcaatgcagatcaacctgaactcaacggaccctgtaccgtctaaaacgccctttagcgtgagtgatgcggattcgtataacaaaaaaggcaccgtcaccgtttatgacagccagggtaatgcccatgacatgaacgtctattttgtgaaaaccaaagataatgaatgggccgtgtacacccatgacagcagcgatcctgcagccactgcgccaacaacggcgtccactacgctgaaattcaatgaaaacgggattctggagtctggcggtacggtgaacatcaccaccggtacgattaatggcgcgacagcggccaccttctccctcagcttccttaactccatgcagcagaacaccggggctaataacatcgtcgccaccaatcaaaacggctataagccgggcgacctggtgagctaccagattaacaacgacggcaccgtggttggcaactactccaacgagcaggagcaggtgctggggcagattgtgctggctaacttcgccaacaacgaaggtctggcatcccagggcgataacgtctgggcggcgacgcaggcttccggggttgcgctgctggggactgccggttccggcaacttcggtaagctgacgaacggcgcgctggaagcctctaacgtggatttgagtaaagagctggtgaatatgatcgtcgcgcagcgtaactaccagtcgaatgcgcagaccatcaaaacccaggaccagatcctcaatacgctggttaacctgcgctaagcgcctgacgggatagcttaatggatcacgcaatttataccgccatgggggcggccagccagacgcttaaccagcaggcggtaacggccagcaacctggctaatgcctcaacgccgggctttcgcgcgcagcttaacgcgctacgcgcggtgcccgttgatggcctctctttagcaacgcgcacgctggttacggcgtcgacgccgggggcggatatgaccccgggtcagttggactacacctcccgtccgctggatgtcgcgttacagcaggacggctggctggtagtgcaagcggcggatggcgctgaaggatatacccgtaacgggaatatccaggtgggtccgaccgggcagttaaccattcagggacatccggttatcggcgaaggcggcccgattaccgttcctgaagggtcggaaatcaccattgcggcagacggcacgatctccgcgctcaatcccggcgacccgccaaacacggtggcgcccgttgggcgactgaagctggtcaaagcggaaggcaatgaggtgcagcggagcgatgacggtttattccgccttaccgccgaggcacaggctgaacgcggggcggtactggccgccgacccgtcaattcgcattatgtcgggcgtgctggagggcagtaacgtcaagccggttgaagccatgaccgacatgatcgccaacgcacgtcgttttgaaatgcagatgaaggttatcaccagcgtagatgagaacgaagggcgagctaaccaactgctgtcgatgagttaatacaggacattttatgatcagttcattatggatcgccaaaaccggtctggacgcgcagcaaaccaatatggatgtgattgccaataacctggcaaacgtcagcaccaatggttttaagcgtcagcgcgcggtatttgaagatctgttgtatcagaccatccgccagccgggcgcgcagtcgtccgagcagacgacgctgccttcagggctgcaaatcggtaccggcgtgcgtccggtcgccacggagcgtctgcacagtcaggggaacctgtcgcagaccaacaacagtaaagatgtggcgattaaagggcagggctttttccaggtcatgctgccggacggtacgtctgcttatacccgcgacggctctttccaggtggatcagaatggtcaactggtgacggcgggcggttttcaggtgcagccggcaatcaccattccggccaacgcgttaagcatcacgattggccgcgacggcgtggtcagcgttacccagcaggggcaggccgcgccggttcaggtcgggcagcttaacctgaccacctttatgaacgacaccgggctggaaagcattggcgagaacctctatatcgaaacgcaatcgtccggcgcgccgaacgaaagcacgccggggctcaacggcgcggggttgttgtatcaagggtatgtcgaaacgtcgaacgttaacgtggcggaagagctggtgaacatgattcaggttcaacgcgcctatgaaattaacagtaaagcagtatcgacgaccgatcagatgctgcagaaactgacgcaactctaaggggccgccggtgggggatacgccaccggctccctgattttgaagatgaaggtaatgcaaaaatacgcgcttcacgcttacccagttatggccctgatggtcgcgacgctgacaggatgcgcctggatacccgctaaaccgcttgtgcagggggcgaccacggcgcagccgatacctggcccggtaccggtggcgaatggctccatatttcagtctgcgcagccgattaattatggctatcagccgctttttgaagatcgtcgaccgcgtaatatcggcgatacgctcacgattgtgttacaggaaaacgtcagcgccagtaaaagctcgtcggcaaatgccagccgcgacggcaaaaccagttttggttttgatacggtaccgcgttatctgcagggattattcggtaattcccgcgcggatatggaggcctccggcggcaactcttttaacggcaaaggcggcgcgaatgccagcaatacctttagcggcacgctgaccgtgaccgtcgatcaggttctggccaatggcaatttacacgtcgtgggggaaaaacagatcgcgattaatcagggaacggaattcatccgcttctccggcgtggtaaatccacgcaccatcagcggcagcaactctgttccctcgacacaggtggcggatgcgcggattgaatatgtcgggaacggctatattaacgaagcgcaaaatatgggctggctgcaacgtttcttccttaatttgtcgccgatgtaagcgaggtgtatgtgtttaaagctcttgcaggaatcgttctggcactggttgccactctggcgcacgccgagcgtatccgggatctgaccagtgtccagggagtacgggaaaactcgctgatcggctacgggctggtggtcgggttggacggtacgggcgaccagacgacccagacgccatttaccactcagacgctgaataacatgctgtcacaactggggattacggtccccaccggcaccaatatgcagttgaaaaacgtggcggcggtgatggtgacggcgtcgtatccgccttttgcgcgacagggacaaacgatcgatgtcgttgtttcctcaatggggaacgctaaaagtctgcgtggcgggacgttattaatgacgccgttaaaaggggtggacagccaggtgtatgctttggcgcagggcaatattctggtcggtggcgcgggcgcttccgcaggcggcagtagcgtgcaggttaaccagcttaatggcgggcgcatcactaacggcgcgattatcgaacgcgagttgccgactcagttcggcgctggcaacaccattaatctgcaattgaacgacgaagattttacgatggcgcagcaaattaccgacgccatcaaccgcgcgcgcggttacggcagcgccactgcgcttgatgcgcgaacggtacaggtacgcgtgcccagcggcaacagctcgcaggtgcgttttctggcggacattcaaaatatggaagtcaacgtgacgccgcaggatgcaaaagtcgtgatcaactcgcgtaccggttcggtggtcatgaatcgggaagtcacgctggatagctgcgctgtggcgcagggcaatttgtcagtgacagtcaatcgccagctcaacgtcaaccagccgaatacgccatttggcggcgggcagaccgtggtgacgccacagactcagatagatttgcgtcagagcggcggatcgctacagagcgtgcgttccagcgccaatctgaacagcgtagtgcgtgcgctgaatgcgcttggcgcgacgccgatggatctgatgtcgattttgcagtccatgcagagcgcgggctgtctacgcgccaaactggaaatcatctgatgatcggagacggtaaattgctggccagcgcggcctgggatgcgcaatctctgaacgaactgaaagcgaaagcgggccaggacccggcggcgaatatccgtcctgtggcccgtcaggtggaagggatgtttgtgcagatgatgctgaaaagtatgcgcgaggctttacccaaagatggtttattcagcagcgatcagacgcgtctgtataccagcatgtatgaccagcagatcgcccagcagatgaccgccggtaagggattggggctggcggatatgatggttaaacagatgaccagcgggcagacgatgcctgcggatgacgcgccgcaagtaccgcttaaattctccctggagacggtaaacagctatcaaaatcaggcgctgacccaactggtgcgcaaagccataccgaaaacgccggacagcagcgatgcgccgctctccggcgacagtaaagactttctggcccggctttcgctccctgcgaggctggccagcgaacaaagcggggtgccgcatcatctgattctggcgcaggcggcactggagtccggctgggggcagcggcaaatcctgcgggagaatggcgaacccagctataacgtatttggcgtgaaagcgaccgccagttggaaagggccggtgacggagatcaccaccactgaatacgaaaatggcgaagcgaaaaaagtgaaagcgaaattccgcgtctatagctcgtatctggaggcattatcggattatgtcgcgctgttaacgcgtaacccacgctacgctgccgtgaccactgccgccacggcagagcagggcgcagtggctctgcaaaacgccggatacgccactgacccgaattacgcgcgtaaattgaccagcatgattcagcagttgaaagcgatgagtgaaaaggtcagcaaaacctacagcgcgaatctcgacaatctcttttaaattgctcaagtccacgtagtcgctgccgataacaacgagtattgaaggattaaaaggaaccatcatgtccagcttgattaatcacgccatgagcggacttaacgccgcgcaggccgcgttaaatacggtcagtaataacatcaacaattataacgttgcgggttatacccggcagacaactattctggcgcaggcaaacagtacgttaggggctggcggctggataggtaatggcgtttacgtttcaggcgtacagcgcgaatatgatgcgtttatcactaatcagctacgcggcgcgcaaaaccagagcagcggcttaaccacgcgctatgaacaaatgtcgaaaatcgacaacctgctggccgataaatccagctcactgtctggttcgttgcagagtttttttaccagcctgcaaacgttagtcagtaacgcggaagatcctgcggcgcgtcaggcgctgattggtaaagcggaagggctggtaaaccagttcaaaaccaccgatcagtatctgcgcgatcaggataaacaggtcaatatcgcgattggctccagcgtggcgcaaatcaacaattacgcgaagcagatagctaacctgaacgatcaaatctcccgtatgacgggcgtaggcgcgggcgcatcgccgaacgacctgctcgatcagcgtgatcagttggtcagcgagcttaacaagatcgttggcgtcgaggtgagtgtacaggacggcggcacctataacctgacgatggccaatggctatacgctggtgcaggggtcgacggcgcgtcagttggcggcggttccctccagcgccgacccgacgcgaacgactgtcgcttatgtcgatgaggccgccggtaacatcgaaattccggaaaagttgctgaacaccggttcgctcggcgggctactgacgttccgttctcaggatctggatcagactcgtaatacgctgggccagttggcgttggcgtttgccgatgcgtttaacgcgcagcataccaaaggttatgacgccgacggcaataaagggaaagacttctttagcattggctcgccggtggtatatagcaacagtaataatgccgataaaacggtatcgctaaccgctaaggtggtcgacagcacgaaggttcaggcgacggattataagattgtttttgacggtacagactggcaggttactcgcactgcggataacaccaccttcacggcgacaaaagatgctgacggaaaactggagattgacggtctgaaagtgacggtagggaccggcgcacagaaaaatgacagttttcttctcaagccggtcagcaatgctatcgtcgacatgaacgttaaagtgacaaatgaagccgagattgcgatggcgtctgagtcaaaactcgatcctgacgtggataccggcgacagcgataaccgcaatggtcaggcattgctggacttacaaaacagcaatgtagtgggcggcaacaaaacttttaacgatgcttacgccacgttggtcagcgatgtgggtaacaaaacgtcaacgctgaaaaccagcagcaccacgcaggcgaatgtggttaaacagctttataaacagcaacagtcggtttccggcgttaacctcgacgaagagtacggcaatttgcagcgttatcagcagtattatctggcgaatgcgcaagtattgcagaccgcgaatgcgctgtttgatgcgttattgaatattcgctaaaggagaaggatgacatgcgtatcagtacccagatgatgtacgaacaaaatatgagcggcatcactaattctcaggccgaatggatgaagctgggcgagcagatgtctaccggtaagcgcgttaccaacccatctgacgatccgatcgccgcgtcgcaggcggtagtactctctcaggcgcaggcgcagaatagccagtacgccctggcgcgtacgtttgccacccaaaaagtgtcgctggaagaaagcgtactcagtcaggtgacgacggcgattcaaaccgcgcaggaaaaaatcgtctatgccggaaacggcacgttaagcgacgatgaccgcgcgtcgctggcgacggatttacagggcatccgcgatcagctgatgaacctggcaaacagcactgacggcaatggtcgctatatctttgccgggtataaaacggaagcggcgccattcgaccaggcgacaggtggttatcatggcggcgagaaaagtgttacccagcaggtggattccgctcgcacgatggtaattggccatacgggtgcgcaaatttttaatagcatcaccagcaatgcggtgccggaaccggatggctcggactccgaaaagaatctgtttgtcatgctcgatacggcaattgccgcactcaagaccccggtggaaggcaataacgtggaaaaagaaaaagccgctgccgccattgataaaaccaatcgcggcttaaaaaattcgcttaataacgtcctgaccgttcgtgcggaactgggaacgcaactgagcgaactcagtacgctggattcactgggaagcgaccgtgcgctgggacagaagctacagatgagcaacctggtagatgtggactggaactcggtcatctcctcctacgtcatgcaacaggcggcattacaggcgtcctataaaacgtttaccgacatgcagggaatgtcgcttttccagttgaaccggtaacacctctttttgaaacatatcacgaaactggatatgttttgtctgcccgcgccatccaccccggcgcgggcatttttttagtcgtcattgagttagtggtcatattgtcgcgcccgtagcgacgccatccgtacgtattatcccgcccgatctcataaacgcctggagtgactaaaagacgccatggggtgaggcattgccctgtaaggggcataaaaaagccgacctggcggtcggctttgtatcagcatttacatcattctaccggctgtgggcgtgtcgccggggcgctggcgtgacgtgtggcgctgtgtccgcctgccgcgcctttaccttcaaagtggaaggaaggccgctgccagtcgctatggtgcggggtttccggcacatattccggcgctggcgcacgcgtcatcggcgcgctggcgtgattatgatcgtcaacgcagacaacgtcctgcgacttttccaccacctgggccggtgcgataacggtttcttctgccgtgtgctccacaacagccgcttccgcttttgtctcttcttctggctcgacaacgacaacatcagctacgttttcagccaccgtaatggacgcgtcggcggtttctgctaccggttcggcgtcagcaataacctcttgcgccaccggcgtatcgctttcggcaatcagttgcggctgttcatcaactggcgcggcaatcacttccggatgcgttgtctcgacctcgacgacttccggcgcctgtggttcggcgacggtctgcggctcaacggcaacgttttctactgcctgtaccgacgcttgtggttcgagcgctgcggtcgcagcgataacctgctgttcagcgacaaccggttgtggcagcgccagatctgcttcacgctgctcgtcaacaacctgcgtttcctgaggacggacaatcgggtagcggatccagactttaccggacgccatttctggcgacgcgcaggcgacggttaacggcattggcgattgtgtcgggtagcgctcgtcacgatagcgacggcgacgctgaccgcttacgcgcaggtggcgcggagaacggcgggagcgacgcggcataccggtattatcgcgaggttctacgctatcatcctgctctggcgcgatatcggcgacgacaggtaaatcaactttcgccagctcggtacgcggcgctggaacgggctgttcaacgttttcaaccgggcgcggttcgtcgacgacgaccggcgtgtcaaccgtttcaaccactgcgctgttggtaaagcggactttctgattaagctggcgctgcttgcggcgcggctgaacctgctgaacgcgttcttcctgctcggtctcctggacaggttgttcttcgcggttaagcgcttttacttcctgctgcgcctggcgcttgtcatcattgcggcggcggctgcgttcgcgacgcggcgtctgttgctgttcatcgccggttttcactttttccgccgtttcctgctggcgggtatcgcgcgcttccgcattttgctgctgcgtctggcgacggttacgacgattatcgtcgcggctctcgccgccgtcacgtccggcacggttatcacgggtgtcgcggcgttcgttacgatcgcgacggttgttctgccgtggcttgcgacgatcctgctgacgctccgctttttcttccgctttcggcgcggctgtttcgacggttttcgtttcttcaccgctgaacagttgtttcagcgcgttaaggaagcggctaaacagacccggctgggcaggctgcgcggcggcaacattatcctttttcgccgtggcgacgctaaccgccggttcgacaggcgtcggcgccggaggcacatctggcatagcgaatgtcgccagcgcaggctgctccgggcgtttacgctcggcgtactcttcttcagaaggcagcgccatcgcttcttcgtgcagcttcggcagcatgtagctcagggtcggcgtttcttcccctttgcgtacgcgcagcacggaatagtgcggcgtttccatctgatcgttcgggacgatgacacagcggacgccatcctgacgcgtctcaatagcgttcactgccgtccgtttttcgttaagcagataagaggcgatcggcaccggaacaatggcatggacttcctgcgtattctctttcagcgcttcttcttcaatcaggcgcagaatggacagcgacagagattcgttatcgcgcacggtgccggtaccgctacagcgcggacacacgtgatggctggattcgcccagagacgggctcaggcgctgacgcgacatttcgagcaggccgaagcgggaaatatggctaatctgaatacgcgcccggtcctgacgcaccgcttcacgcagacggttttctaccgcgcgctggtgacgtaccggcgtcatatcgataaagtcgataacgatcaggccgcccaggtcgcgcagacgcaactggcgggcaatctcatcggccgcttccaggttggtattaaacgccgtttcttcgatatcgccgccgcgagtcgcgcgggcggagttgatatcgatggcggttaacgcttcggtactgtcaatgacgatggagccgccggagggcaggcgcacttcacgctggaacgctgactcgatctgcgattcgatctggtaatggctgaacaacgggatttcaccggtgtacagcttaattttgctgctaaaatccgggcggcccaacgcggcgatatgctgacgcgccatttccatcacttttggattgtcgatcaggatttcaccgatatcctgacgcagatagtcgcgaaacgcgcgtacgatgacgttgctttcctgatggatcaggaacggcgcgggacggctttcagcggctttctgaatggcctcccagtgtttcaggcggaagcttaaatcccactgcaacgcttcggcggatttacccacgcccgcggtacgcacgataagccccatcccttcaggaagttccaggctggccaacgcttcttttaactcggtacgatcgtcgccttcaatgcgacgggaaataccacccgcgcgcgggttattcggcatcagtaccaggtagctgcccgccagactgataaaggtggttaacgccgcgcctttgttgccgcgctcttctttatcgatttgaacaatgacttcctggccttcgcgtaacacgtctttaatgttcgggcgaccatgagcgctgtagttagcggggaaatattcgcgggcaatttcttttaacgggaggaaaccgtggcgttctgcgccgtaatcaacaaaagccgcttccaggctcggttcaatacgggtaattttgcctttatagatgttcgcttttttctgctcgtgtccggggctttctatatccagatcgtacagacgctgcccatctacaagggcgacgcgcaactcttcctgctgagtcgcgttgattaacattcttttcatcgtaacttactcattattcttacgttgacgactaagctgcgggcatggtgacgccttaccgggcatgaaccgatggcctcgtgactatttcgcgtcgccaacctcacggttatcgtcagctcaaagaggcgcagagtgtcggttgcctgtatttcatacggaaacacagcgcaattatcagggaagcagcctgggcattactctccagagaagatcctatctaccggtaaggactgcaacccgcagcccgctaactgtctgaaaaatcaatacgtcttacgccattgctgcgttgatgatcggtcagacaaaatgggttattccgctaaactttttgttttaacaagtttcggtgcggaaaccgcatcattattccactgctaaccttgttatagcaagatgacttttaccatttatcacccgcttactcacagttttttcaccagcgtgagccaatcgctttaataaccagcaaaaccgcagtgaaaaatgttcatccactggcgtagacgtctctataagcatagaaaaatgtgtggcgcgaatctcacaggctatttagaatctccccccatgaaaacagaaacgccatccgtaaaaattgttgctatcgccgctgacgaagcggggcaacgcattgataactttttgcgcacccaactgaaaggggtaccaaaaagtatgatttatcgcatcttgcgtaaaggcgaggtgcgggtgaacaaaaaacgcattaaaccggaatacaaactggaagcgggcgatgaagtccgcattccgccggttcgcgttgctgaacgcgaagaagaggccgtgtcgccgcatttgcaaaaagtggcggcgttggcggacgtcattttgtatgaagacgaccatattctggtgctgaataagccttccggcaccgccgtacacggcgggagcgggttaagttttggcgtcatcgaagggctgcgggcgttgcgtccggaagcgcgattcctggaactggtgcatcgtcttgaccgcgatacctccggcgtgctgttggtggcgaaaaaacgctccgcgctgcgttcgctgcatgagcaactgcgcgaaaagggaatgcagaaagattatctggcgctggtgcgcggccagtggcaatcgcacgttaaaaccgtacaggcgccattattaaagaacattctgcaaagtggcgaacgcattgttcgcgtgagccaggaaggcaaaccgtcagaaacgcgcttcaaggtggaagagcgctatgccttcgccacgctggtgcgctgtagcccggtcacgggccgtacgcatcagattcgcgtacatacccaatatgccggtcaccctattgcgttcgacgatcgctacggcgaccgtgagtttgatcaacagcttaccgaagcgggaaccggtcttaaacgtctctttctgcacgccgcggcgctgaagttcacgcatccgggaacgggcgaagtcatgcgcattgaagcgccaatggataacgccctgaagcgctgtctgcaggtgctgcgtaacgcaaaatagttcctctttcgggcaggttatctgcccgaatctcacttttctcataatatttttgttttgctgtatccgacgcatttttaccgttgtgcactgtttattcttgcgatccggatttcggcgcgtttaaggacgaacagatggccaatactagctggatgcgctcatttactcagcgttggggaaaatacgttatcgtgccgctcgtgatcgcgatgctgaccggttgcgaagggaagggcgatagttcacgacgggctttcgttgagtatttgaatacgcaaatcattacgtctcccgtggtgggcgtctgtgagttgacgccagcccaacgtcaggcttttggtcattacgccgatgactacgatgtactattaactgcctacgggcaaatctttgctgtggtgtatgagaccggccaggaggataagatcaccggtgttattcagtctgagcgtgataatctggttttcctgaacgagctacgtgtggctcgtgacgtaaacaatcgatttatccttcggttgaaaaatgtgagtagtgaaaacagaaaaaaatattctgctttaaagctccccgctgatgtgaagcctgtctttgacgctgcgtggaataaaaccgtaacaccgctggatgagacgatgactcgctattattttctgcgcggaaagcggctcgaccaactggtcgcaatgggcgagtttctgcaaaaacagggaaataaagtccgctttgaaacgaatggaaaagcggtttttgccgacctggcagcaaaagaacactttcaggatcaacaatttaattttttcattacgcagaatgatataaaccatcttactcagcagatggttgaatttataaatagtcaacaagatgcggctgatgctggcggcgttaattaaaggaatgtgtcgtgaggtgaagcaatgttcgggggagggcgtaaactcatcgcgagatggaatttaacgagtcgcaaagggaaggtttcaggacagtaaacgtcctgagagttgttcgcgagaataagtttgtaagccgcttttgacgccgtagagcgcgtcaggcgagtattgagaacatgtgtttttacaaaactgaactgagatggggaattcattaacgcgcacgtacaccgctgttgataccctatgggataaaacgcaccgtacatcggttcgtaataccaatgctttttttctggtcggtgaatggattgaccaggaaacgggcccgcacgaagagagtgaagatcggcaggcgctaaattgttcacaacaagcgctttccagttggttagaactggaagcggtcgaaactgctccccaataaacgggagataactaccaacacgtgcagaaacggcttttagcggtatttgaaaagcctacagagtaggccgtttattgctgtagcgggttgaagccctcccgtcgcagcatctggcacagggcaataagcggcaagccgatcagcgtgttcggatcacgaccctccaggcgctcaaataatgcaatgcctaaaccttcgcttttaaaacttcccgcgcagtgcagcggatgctctttacggacatagtcgtctatttccgcttcgcttaaatggcgaaaatgaacgtcaaaaggctccacttcggtttgtaagtgcccggaggcggagttatacagtgccagtccggtataaaacgtcacaatatttccgctggctttggctaattgctgacgcgctttttcttccgtcagcggtttgccggtgatttcgccgtccagaacacaaatttggtcggagccaataatcaaatgattcgggaaacgcgcggcgagcgattgcgccttcgcctgcgccagccgcagcaccaactgacgcggcgcttcgcccggcatgggggtttcatcaacatccggcgcggcgcattcgaaaggaatcgtcagcttttccagcagcgcgcgacgccagggagaggtagacgcaaggatgagacggggcatattttttccctcagatatagcgtaatgatgagagccatcttaaactatgctcttcggtcttcaagcctgtcatactgactcgtcttgagcgaaaataagtctgtaacccgcaatgtgtgcgaattattggcaaaaggcaaccgcaggctgcctttttctttgactatatgacgttacgaagttaatatgcgcgccctatgcaaaaggtaaaattacccctgactcttgatccggttcgtaccgctcaaaaacgccttgattaccagggtatctatacccccgatcaggttgagcgcgttgccgaatctgtagtcagtgtggacagtgatgtggaatgctccatgtcgttcgctatcgataaccagcgtctcgccgttttaaccggcgatgcggtcgttacggtgtcgctcgaatgccagcgttgcgggaaaccgtttacccatcaggttcacacaacgtattgttttagccctgtccgttccgacgagcaggctgaagcactgccggaagcgtatgagccgattgaggtaaacgaattcggcgaaatcgatctgctggcgacggttgaagatgaaatcatcctcgccttgccggtagttccggtgcatgattctgaacactgtgaagtgtccgaggcggacatggtctttggcgaactgcctgatgaagcgcaaaagccaaacccatttgccgtattagccagcttaaagcgtaagtaataggtcttccccgcggacgcagggataaaccgtaattgaggagtaaggtccatggccgtacaacagaataaaccaacccgttccaaacgtggcatgcgtcgttcccatgacgctctgaccgcagtcaccagcctgtctgtagacaaaacttctggtgaaaaacacctgcgtcaccacatcactgccgacggttactaccgcggccgtaaggtcatcgctaagtaatcgcgcgatactcgatgccttttgcatcacaggcgtgcctgtggtgtaaaagccgaagagtacaagcgtgataaagcttagtgaggatttctccgcgtaagcggagaacaccgaaccaggcagcgacgataccttgacacgtctaaccctggcgttagatgtcatggggggcgattttggtccttccgtgacggtgcctgcagcattgcaggcactgaacgctaattcgcagctcactcttcttttagtcgggaatcccgatattatcacgccattacttgccaaagctgactttgaacaacgttcgcgtctgcagattatccctgcacagtcagttattgccagtgatgcccggccttcgcaggcgatccgcgccagtcgtgggacatccatgcgtgtggccctggagcttgtgaaagaaggccgagccgaagcttgcgttagcgccggtaataccggggcgctgatggggctggcgaaattattgctcaagcctcttgaggggattgagcgtccggcgttggtgacggtattaccgcaccagcaaaagggcaaaacggtagtgcttgatttgggtgccaacgtcgactgtgacagtaccatgctggtgcagtttgccgtgatgggcgccgttttggcggaagaggtcgtcgggatcaaaaatccccgcgtggcgctactcaatatcggggaagaagaaaccaaaggcctcgacagtattcgcgaagcctctttaatgttaaaaacagtcccaaccatcaattacatcggctaccttgaggcgaatgagttactgacgggaaaaaccgatgtactggtgtgtgacggctttacaggcaatgtcacacttaaaacgatggagggggttgtcagaatgttcctttcactgctgaaatcacagggcgaggggaaaaaacggtcgtggtggctgctgttattaaaacgttggttacaaaaaagcctgacgaggcgattcagtcacctcaaccccgaccagtataatggcgcctgtctgttaggattgcgcggcacggtgataaaaagtcatggtgcggccaatcagcgagcatttgcagtcgcgattgaacaggcagtgcaggcggtgcagcgacaagttcctcagcgaattgccgctcgcctggaatctgtatacccagccggatttgaaccgctggacgatggcaaaggcgtaaacctgcgggcgcacagataatatcgttgtctccccggcgccgccagcgtgccagacgtttacaggtaacggtatataaccgaaaagtgactgagcgtacatgtatacgaagattattggtactggcagctatctgcccgaacaagtgcggactaacgccgatctggaaaaaatggttgagacctctgacgagtggattgtcactcgtacaggtattcgtaaacgccatatcgccgcgccgaatgaaactgtcgcgacgatgggctttaccgctgcgaatcgcgcgattgagatggcggggatcgataaagaccaaattggcttgattgtggtggctaccacatcagcaacgcatgcatttccaagcgcggcatgtcagattcaaagtatgctcggtattaaaggttgcccggcgtttgatgtcgcggcagcgtgcgcaggtttcacctacgcgttaagcatcgccgaccagtacgttaaatccggcgcggttaaacacgcgctggtggtcggttccgatgtattagcccgcacttgcgatcctggcgatcgcggtacgatcattattttcggcgatggcgcaggcgcggccgtactgagcgcttctgaagaaccgggtattatctccactcatcttcatgccgatggccgttacggtgaattactgaccctgccgaatgccgatcgcgtaaatccggataacccgatttacctgacaatggcgggcaatgaagtctttaaagtggcggtcactgaactggcgcatattgtcgatgagacgctggcggctaataacctggatcgctcagaactcgattggctggtgccgcatcaggctaacctgcgtatcattagcgcgacagcgaaaaaactcggcatgtcgatggacaatgtcgtcgtcacgctggacaggcacggcaatacctccgcggcttctgtgccgtgcgcgctggatgaagccgtgcgtgacgggcgaattaaagccggtcagctggtattgcttgaagccttcgggggtggattcacctggggctccgcgctgattcgtttctagtataaggatttaaacatgacgcaatttgcatttgtgttccccggtcagggttctcagagcgttgggatgttggccgagatggcggcaaattaccctatcgtagaagaaacgtttgctgaagcttctgcggctctgggatatgatctgtgggcgctcacccagcaaggtccagcggaagaactgaataaaacctggcagacgcagccggcgttattaaccgcttccgtcgcgctttggcgcgtttggcagcagcagggcggtaaaatgcctgcgttaatggcaggtcacagcctgggcgaatattccgcgctggtttgcgctggcgtcatcaactttgctgatgccgttcgtctggtggaaatgcgcggtaaattcatgcaggaagcggttccggaaggcactggcggcatgtctgcgatcatcgggctggatgatgcctctattgctaaagcctgtgaagaatctgccgaagggcaggttgtttcgccggttaactttaactcgccgggacaggtggttatcgccgggcataaagaggcggtagaacgtgcgggcgcagcctgtaaagccgctggcgcgaaacgcgcgctgccgctgccggtgagcgtaccgtcgcactgcgcgctgatgaaaccagcggcagataagctggcggttgaattagccaaaattacctttagcgcgccaacggtgccggtagtgaacaacgttgacgtgaaatgtgaaaccgatgccgccgctatccgcgatgcgctggttcgccagttgtacaatccggtacagtggacgaagagcgtggaatttatcgcggcgcagggcgttgaacatctttatgaagtgggtccaggtaaagtcctcactggtctgacgaaacgtattgtcgacaccctgacagcgtcggcgctgaacgagccggcggcgctgtctgcggcacttacgcaataaaagaggaaaaccatgagctttgaaggaaagattgcgctggtgactggtgcaagccgtggcataggccgcgcaattgcagagactctcgttgcccgcggcgcgaaagttatcgggactgcgaccagtgaaaatggtgcgaagaacattagcgactatttaggtgctaacgggaaaggtttgatgttgaatgtgaccgatcctgcatctattgaatctgttctggaaaatattcgcgcagaatttggtgaagtggatatcctggttaataatgccggtatcactcgtgataatctgttgatgcgaatgaaagatgatgagtggaacgatattatcgaaaccaacttatcatccgttttccgcctgtcaaaagcggtaatgcgcgctatgatgaaaaagcgttgtggtcgcattatcactattggttctgtggttggtaccatgggaaatgcaggtcaggcaaactacgctgcggcgaaagcgggcctgatcggtttcagtaaatcactggcgcgtgaagttgcgtcccgtggtattactgtcaatgttgtggctccgggttttattgaaacggacatgacgcgtgcgctgtctgacgatcagcgtgcgggtatcctggcgcaggtgcctgcgggtcgcctcggcggcgctcaggaaatcgccagtgcggttgcatttttagcctctgacgaagcgagttacatcactggtgagactctgcacgtcaacggcggaatgtacatggtttaatcacgattgaaaaatatttgcgttattagggcgaaaggccgcaaaataacgtaaaatcgtggtaagacctgccgggatttagttgcaaatttttcaacattttatacactacgaaaaccatcgcgaaagcgagttttgataggaaatttaagagtatgagcactatcgaagaacgcgttaagaaaattatcggcgaacagctgggcgttaagcaggaagaagtaaccaacaatgcttctttcgttgaagacctgggcgcagattctcttgacaccgttgagctggtaatggctctggaagaagagtttgatactgagattccggacgaagaagctgagaaaatcaccaccgttcaggctgccattgattacatcaacggccaccaggcgtaagtgaacatctccaggcggtcgttcgaccgcctgagttttatctttttgtcccactagaatcattttccctccctggaggacaaccgtgtctaagcgtcgtgtagttgtgaccggactgggcatgttgtctcctgtcggcaataccgtagagtctacctggaaagctctccttgccggtcagagtggcatcagcctgatcgaccatttcgatactagcgcctatgcaacgaaatttgctggcttagtaaaggattttaactgtgatgacattatctcgcgcaaagaacagcgcaagatggatgccttcattcaatatggaattgtcgctggcgtacaggccatgcaggattctggccttgaagtgacggaagagaacgcaagccgtattggcgccgctatcggctccggtatcggtggtctcggtctgatcgaagaaaaccacagttcgctggtaaaaggcggaccgcgtaagattagcccgttctttgtcccgtcgacgattgttaacatggtagcaggccatctgactatcatgtatggcctgcgtgggccaagcatctctattgcgactgcctgtacttcaggcgtgcataacatcggccatgccgcgcgtatcatcgcctatggcgatgcggacgcgatggtggcaggtggcgcagaaaaagccagtacgccgctgggtgtaggtggttttggcgcagcgcgcgcgctgtcgacccgcaacgataacccacaggcggcgagccgtccgtgggataaagaacgcgatggttttgtactgggcgacggtgccggtatgttggtgcttgaagagtacgaacatgcaaaagcgcgtggtgcgaaaatctatgccgaaatcgtcggctttggtatgagcagcgatgcttaccatatgacgtcgccgccggaaaatggcgcaggcgctgcgctggcgatggttaacgcgttgcgtgatgccgcgattgagcctgctcagattggctacgtcaacgcgcacggcacgtcgacgcctgccggcgacaaagctgagacgcaggcggttaagtcagtctttggcgatgctgcaagccgagtgatggtgagctcgaccaaatcgatgaccggccatctgttgggcgccgcaggcgcagtagagtctattttctctattctggcgctgcgcgatcaggccattccgccaaccattaatctggataacccggatgaaggttgcgatctggacttcgtgccgcatgaagcgcgccaggtcagcgatctggagtacgctctgtgcaactcctttggttttggcggaactaacggttccttgatctttaaaaagatctaagttaagccagagacagacattaataaaaaggtccgcttgtcgggccttttttatcaggcatatcacctcttgttctgcgttattcatcctgccacactaacaggcgacggataaggagccactatgtttttaattaatggccatgcgcaggatcaacttgctgtaagcgaccgggcgacgcagttcggcgatggcagttttacgaccgcacgtattgttgatggcaacatttgccatctggaagcgcatcttcagcgcttgcaggttgcctgtgaaaaattacggatcgcttttagccattggtcgacccttcggcaagagatgacaatgttggccacagggcatgattcaggcgtgttgaaagtgatcattagccgtggtagcggcggccggggatacagcgccatgaattgtcaggcagctacccgaatcctctccgtttctgcttatcccgcttattattctcagtggcgtaagcaaggcatcactcttacccttagtcccataccgcttgggcgcaatccttatcttgccggattaaaacatctgaaccgcctcgaacaggtgttgattcgctctcatcttgagcagacggacgccgatgaggcgctggttcttgacagcgagggatgggttacggaatgctgtgcggctaatttgttctggcgtacaggcgacattgtttttacgccgcgtctggatcaggccggggtgaacggcattatgcgacaattttgtttacgccaactggcgcaatctcctttccaggttcttgaagtacaggcgagagaggaggcagtcaggcaggcggatgagattatcatctgcaacgcgctaatgccgattattcccatacgcgcctatcacgggacgtcgtattcttcgcgaacactgtttcaatttttagccccattttgtgagcatccgaattagttatgaaaaaattgtcaggcgttttccttctgctgttggttgtgctgggtattgccgtgggcgtggggatgtggaaagttcgccatctggcgaacagcacgttacttattaaagacgagactatctttacgctcaaggcgggaacggggcggctggcgcttggtgaccagctttatgatgaaaaaatcattaatcgcccccgggtatttcagtggctgctgcgcgtggagcctgagttatcacactttaaagcgggaacttaccgttttacgacggggatgaccgtacgggagatgcttgagttgctggagagcggcaaagaagcgcaattcccgttgcggtttgtggaagggatgcgccttagcgactacctgaaacagctacgagaggcgccgtatattcgccatacattgccggatgatgactacgccactgtcgctcaggcattaaagcttgcgcacccggaatgggtagaagggtggttctggcctgatacctggatgtataccgccaacaccagcgatgtcgctattctcaagcgagcgcatcaaaagatggtgaaagctgtcgatactgtctggaaaggtcgggccgaggggctgccttataaagatcagaaccaactggtgacaatggcctcgattattgaaaaagagacggctgtcgccagcgaacgcgatcaggtggcctcagtctttattaatcgcctgagaatcggtatgcgccttcagaccgatcccaccgtgatttacgggatggggacgagttataatggtaacttgtcgcgtgcggatctggaaaagccgacggcttataacacgtataccataaccgggctgccgccaggaccgattgcatcgcccagcgaagcgtcattgcaggcggcggcgcatccggcgaaaacgccgtatctctattttgtggccgacggtaaaggcggtcacacatttaacaccaatcttgccagccataatcggtcagtgcaggagtacctgaaagtgcttaaggaaaaaaatgggcagtaattatatcgtcatcgagggcctggaaggcgccggaaaaaccactgcgcgcgacgtggtggtggagacccttgagcaactgggtattcgtaatatgatttttacccgtgagccgggcggtacgcagcttgccgaaaaactaagaagtctggtgctggatattcgatcggtaggcgacgaagtgattaccgataaagcggaagtgctgatgttttatgccgctcgcgtacagctcgtcgaaacggtaatcaaacccgcgctggcgcaaggcgtatgggtgatcggcgatcgccacgatctctcgacccaggcgtatcaggggggagggcgcggcattgatcaaaccatgctggcgacactacgcgatgccgtgctgggcgattttcgtcctgacctgacgctgtatctggatgtcacgccggaagtcgggctaaaacgcgccagagcgcgcggcgatttggatcgcattgagcaggaatcttttgatttctttaaccggactcgcgcgcgctatctggaactggcggcgcaagactcgcgtatccgcaccattgacgcgacccagccgctggatgccgtcatgcgcgacattcgcgccacggtgacgaagtgggtgcaggagcaagcggcatgaaatggtatccatggttacggcccgcctatgaaaaactggtagaaagttaccaggcgggacgtgggcaccatgcgctactgattcaggccttacctggcatgggcgacgaggcgctgtgctatgcgctgagccgttatctgttatgccagcagcctgagggccacaaaagctgtgggcattgccgtggctgtcagcttatgcaggctggcacgcatccggactattacacgctgacgccggataaaggcaaaagcagcctcggcgtagatgcggtacgcgaggtcagcgagaaattgtacgagcactcccgtctgggcggcgcgaaggtggtgtggattgcggatgcggcgctattaaccgacgccgccgccaatgcgttgctcaaaacgctggaagagccgccggagcaaacctggtttttccttgccagcccggagcctgctcgtctgttggcgacattacgcagccgctgccggctgcatcatctggcgccgccgtccgaatcgtatgcgatgtcatggctgtcgcgagaagtgacggcgtcacaagaagcattgctcacggcgctacgtctgaatgcggggtcgcccggcgccgcgctggcgctgttgcagtctgaacgctgggcgcagcgtgaggcgctgtgtcaggcgttaatggacagtttgcatacgggcgactggtatgcggtattaacggcgctcaatcatgagcaagccccggcgcgcctgcactggctggcgacgctgctggtagacgcgctgaaacgtcagcacggcgcgtcgtacctgacaaacgttgatgcggacgcggttgttgccgcgctggcggggccgctatccccggcgcgtattcaggcaatcctgaacgatgtttgccattgtcgtgatcaattacttcatgtgaccggattaaaccgcgaactggtattaaccgatctcattctccgcatcgagcattacctgcaaccaggcaccttgttgcctgttcctcatctttgagagagacattatgtttttagtcgactcacactgccatcttgatggtctggattatcaatctttgcataaggacgtggacgatgtgctggcgaaagccgccgcgcgcgatgtgaagttctgtttagcggtggcgacgacgctgccggggtatcgccatatgcgcaagctggtgggcaagcgcgataatgtggtcttttcctgcggcgtgcatccgttaaatcaggatgaagcatatgacgtagaagaactgcgcctccttgctgcagaagacgatgtggtggcgatgggcgagaccgggcttgattacttttacacgcctgagaccaaaatccgccagcaggcgtcttttattcatcatatccagattggccgcgaattgcataaaccggtgattgtccatactcgcgacgcgcgtgccgatacgctggctatcctgcgcgaagaaaaagtgacggattgcggcggcgtactacactgttttacagaagacagagaaacggccggcaaattgttggatctggggttttatatctctttttccggcatcgtaacgttccgtaacgctgaacagttgcgtgatgcggcgcgctatgtgccgctggatcgattattagtcgagaccgattctccttatctggcaccggtgccgcatcgcggtaaagagaaccagcctgcgatggtacgcgacgtcgcagaatatatggcggtattgaaaggggttgccgttgaagaactggcgcagatcaccaccgataactttgctcgcctgttccatattgacgcgtctcgcctgtcatcaatccgttaaacgagtttttttaaagctcgtaattaataaacaaaacgcgtaaagttcaccgccacaaaaggggcggtgagcgagcttatggaaacattcggaaactcattttggcagaatgtgatactttttaggctatctggcgctgaaacgtgatagccgtcaaacaaaatcagacgtatttattttactctgtgtaataaataaaagggcacttagatgtcctgtccacggcggggttctcccccctcgccaatgcgtgagaacgtagaaaagcacaaatactcaggagcactctcaattatgtttaagaatgcatttgctaacctgcaaaaggtcggtaaatcgctgatgctgccggtatccgtactccctatcgcaggtatcctgctgggtgtcggttccgctaacttcagctggctgccagccgttgtatcgcacgttatggcagaagcgggcggatctgtttttgccaatatgccgctgattttcgctatcggcgtggcgttgggcttcaccaacaacgacggcgtttcggctctggcggcggtagtcgcgtatggcatcatggtgaaaaccatggctgtggttgcgccgctggttctgcatttacctgctgaagagatcgccgctaaacaccttgctgatacgggtgttctcggggggattatctccggtgcaatcgcagcgtatatgtttaaccgcttctaccgtatcaaactgcctgagtatctgggcttctttgcgggcaaacgcttcgtgccgatcatttcgggtctggccgctatttttaccggtgtggtgctgtctttcgtatggccgccaatcggtacggctatccaggcgttctcgcagtgggcggcttatcagaacccggttgtcgcgtttggtatttacggttttatcgagcgttgcctggtgccgtttggtctgcatcatatctggaacgttcctttccagatgcagatcggcgaatataccaacgcagcgggtcaggtattccacggcgacattccgcgctatatggcgggcgacccgacggcaggtatgttgtctggcggcttcctgttcaaaatgtacggtctgccggctgcggccattgctatctggcactctgctaaaccggaaaaccgcgcaaaagtgggcggtatcatgatttccgccgcgctgacctcgtttttgacgggtattaccgagcctatcgagttctccttcatgttcgtggcgccgatcctgtacattattcacgcgattctggcaggtctggcattcccgatctgtatcctgctggggatgcgtgacggtacgtcgttctcccacggtctgatcgactttatcgtgctgtccggtaacagcagcaaattgtggctgttcccgattgttggcgccggttatgcgattgtgtactacaccgtgttccgcgtgctgatcaaagcgttggatctgaaaacgccgggtcgtgaagacactactgatgacgcaaaagcgggggcgaccagcgaaatggcgccggctttggttgcggcgtttggcggtaaagagaacatcactaacctggatgcctgtatcacgcgtctgcgcgtgagcgtagccgatgtagcgaaagtggatcaggctggcctgaagaaactgggcgcggcaggcgttgtcgtcgcgggttccggcgttcaggctattttcggtacgaaatccgataacctgaaaacggaaatggatgagtacatccgtaacagctaagcagtaatgatgttggggagaattaaggcagccattcggctgccttttttaatggcgctttacatgccgctctccgacagtctgtcagaactgataattggcggtgaggctgacgttacgcggtgcgccgtaaacaatggaaccatcaatattggtgtcgtaggttttatcaaacaggttgttgatgtttccctgtacggagaaatttttcgtcacctgatagcgggtaaacagatcgaccagcgcatagctgccctgttcggcgcggaaagtgccgtacggcgtcgtggtatctttgtaaacccgattctgccagttcacgccgccgccgaccgtcagctccggtatcgccggcagacgatagcgggtgaataacttcacgctggtgcgcggaagattagggttcacggcgttaccttcattgtcctcggcaacataccgggtagccccgaaagtcatctgccagttatcggtaattgcgccgttcacttcaaattcgacgcctttgctcaccgttccgtcagtagacttccaggcaaactccccattactgccagggatgggaatagtggttgcctgagcgacgttattctgctcaatgcggaacacggacaacgtggtggtgaggcgactgttcatccagtcggacttcagacccgcttcatagttattaccggtaatcggagccagatattgacccgctttgtcgcgtttattctgcggctgaaagatagaggtataactggcataagcggaccagttgtcgttgatatcataaatcagcccggcatacggcgtggtatggtttttctccatgctgtaggtcagtgtatcaacacgccagttggtataacgagcgccgagaatcagatgcagcgggtcggccagcgaaatgcgcgtagcggcatacagcgatttcatatgcgtggtatcgtcctgcgccagattttgtggcgcccagtgggtttgggggaaattaccgttaaaggcgctgaagttgccaatgtcgtccggaaagacgttcgcccaggcgctaaaatagcggttattctgtttactataactgccgccaaacatcatattgtgctgacggccaaacagctcataagcgccatcggcaaagagatctatggcatctactttgcgcttgccgctgttccagcccgtaccgccgaccacggggtagcttgcgccataaggactcaccagcgtacctgtctctttatcgactaacgtatcgatatacatcattttactgtcgaatttgacctcagtatgggtcgcattcagggtcgcctgccagctttcggcaaaacgctgtttaagcgtgacgaagaatttatttatctctttgttgttataagcccagtccggggcggtactacgcgcgcggtcatagctatttttgctgccatcggtgttccagcgcggcagaccgccccaggttgggctgttgacatcaattttttgatattcataaccggctgaaaggttggtggttgtacccagatcggcatcgacaattccggaaaagaacgctttctcactgttatagcggtccagccaggaatcattattctgataacccgccacgatgcgcccacggacattaccgtctgcggtgagcggactttgcagatccatgacgtaacgctgcttattccagctaccgtattctgtggagacgttacctttgaactcccgactggtggcgtgtttacggatcatattaattgaggcagaaggattaccggtcccggtcatcagcccattcgcgccgcgaaccacctccacgcgctcatacagcgcggtatccgttagcgcatcgcccagattccagcgggactcaaaatacgttggaataccgtcaaccatatagttgtcaatttcaaacccgcgcgagtaatagctgatgcgatcggattcagcctgacttccgctgatccccagcgtattggtcatcacctcgcccagggtttgcaactgctggtcttccatacgctgctggctgacaatactgaccgactgcgggatatcgcgctgagtcatcggcattttggtgcccgctgcggtcgttttcatgctgtaatcctgttcttcacggtttacggcgtcagcggtcgtctcgccttcgacaataacggtatcctcagccgcgaaggcggcaggcataaatgccatcgccatacccatagctaacagcgacggtgcggcggtggacggaaggtgtttgtcccggcggtattgaatgaaagacatctgaaaatccttgcttgttattggggtaagttcaggacgtatgacgttgaaccttttcattctttgctagttaatgcgcataaaaatgcaaatgagaaatatacgcatttgtattaaatgtgtaaaacggtataaccagggaaactagaaatattttttaagcgtacaaaggcgtcatggctgggggatatggcggtaagtccagcatgtagtcatttttcgcttaataaatcgtgggttaaagttgaaagagcgtcggtaactcgctcatactctatactcgcagtatggctcggcgtagcatgtgcgctgcaagggctattatgaaaaaggaaaacgtcgtggcagaagaaactatattcagcaaaattattcgtcgtgaaatcccttcggatatcgtttatcaggatgagctggtcaccgcctttcgtgatatttcaccgcaggcgccgacgcatatcttgattattcccaatatcctgatcccaaccgtcaatgacgtgacggcggaacatgaacaggcgttaggtcggatgatcaccgtggcggcgaaaatcgccgaacaggaaggcattgccgaagatgggtatcgtttaatcatgaataccaaccgtcatgggggccaggaggtttatcatatccatatgcacctactgggcggccgcccgctaggcccgatgctggcgcataaaggcttgtaagtatgatcaaaggatgcatcgcggtttctctgggcttgctgctgcttaccggctgccggtcacaccctgaaattccggtaagcgacgcgcagtcgctggtgatggagtccacggttctggcggcgggcgtcaccgcagagccgcctgaactgacggcgtctgatatccagccatcagcctcttcccgcgtctataacgaaaggcaagagcccataaccgttcattatcggttttactggtatgacgcgcgggggctggagatgcatccgctggaggcgccgcgtagcgtaaccatacccgcgcgttcgtcggtaacgctatttggcagcgccaattatctgggggcgcataaggtcaggctttatctttatttgtgaggagtgaattttgatgacaaaaatgcatcgctacgctgccattgctgcgctggcgatatttctctccgggtgtatggcgcaacgtcaacctgcgccagttgaagaggtaaaaccagcgccagaacaacccgcgcagccgccgcagcctcctgttgtgccgtctgtgccaacgattccacagcaaccggggccgatcgaacatgaagatcaaacgggccagccagcgcctaaggtgcgccactatgactggaacggcgcgatgcaaccgctggtcagcaaaatgttgcaggctgatggcgtgacggccggaagcgtattgcttgttgacagcgtgaataaccggacgaatgggtcgttaaatgcgaacgaggcaacggaaacgttacgtaatgcgctggcgaacaacggtaaatttacgctggtgtccgtacagcaactctcgatggcaaaacagcagttaggattgtctccgcaggatagtctgggaacgcgcagtaaagctattggcattgcgcgcaatgtcggggcgcaatatgtactttactccagcgcatccggtaacgttaacgcgcctgcattacagatgcagttaatgctggtgcaaactggcgagataatctggtcaggtaaaggtgcggtccaacaacaataatcccttaacgcgcgacgagatcctgtcgcgctattttccccagtatcgtcccgccgtcgccacatcgcaggggctaagcggcgggagctgtattattgcccacgatactcaccgtgtcgtgctgcgccgtcatcacgaccctgacgctccaccagcccattttttacgtcattaccgcgccttatcccaattgccggccagtcttgcgccgcgagcgcttttttatactccaggctggatggcggtagaatatctgcatggtgtggtaaattccgctctgccagatgccgacgaactggcggccttactgtatcatttgcatcaacagccgcgttttggctggcgtatcgcgctatcgccactattggcgcagtactggtcgtgttgcgatccggcaaggcgtacgccgttttggttgcggcggctcaaacagttgcaaaaaaacggtgaacctcgcccgcttcggctcgcgcctttgcatatggatgtccatggcgacaatatagtattaacgtccgccgggttgagactgattgactgggagtatgccggcgacggcgatattgcgttggagctggcggcagtatgggttgaggatgaacgccagcaccgacaactggcagacgcttatgccgcgcgcgcgcgaatcgacgcccggcagctatggcgacagatacgattatggcacccctgggtcattatgctaaaagcagggtggttcgaataccgctggcgacaaaccggcgagcaacaatttatcaggctggccgatgaaacctggcgccagctacgtatgaaaggataaggagagcagtgtgggcccagtaatgttgaatgtcgaaggatgtgagctggatgcggaggagcgcgagatactggcgcatccgctggttggcgggcttattctgttcacgcgtaattaccatgacccggaacagttgcgcgaattagtgcgccagattcgggcggcatcgcgtaaccatctggtggtggccgtcgatcaggaaggcgggcgcgtacagcgtttccgtgaagggtttacccgcctgcccgcggcgcaatctttttttgcgctgcatgggctggaagagggggggcgactggcgcaggaggcagggtggctgatggccagcgaaatgatcgcgatggatattgatatcagttttgcgccagtgctggatgtcgggcatatcagcgcggcaattggcgagcgttcttatcatgccgatccagcaaaagcgttggcaatggcaacgcgctttattgacggcatgcatgacgccgggatgaaaacgaccggtaagcatttccccggccacggcgcggtcacggcggactcccacaaagagacgccgtgcgatccacgtcctgaaacggacatccgtggcaaagatatgtcggtgttccgcacgctgattagcgagaataaactggatgcgattatgcctgcccacgtgatctaccgcgctatcgatccgcgtccggcaagcggttcgccgtactggctgaaaacggtgctgcgtcaggagttaggctttgatggcgtcattttctccgacgatctgtcgatggagggcgcggcgattatgggcagctatgctgagcgcgctcaggcgtcgctggatgcgggttgcgatatgattctggtctgcaataatcgtaaaggcgcagtcagcgtgctggataatctgtcgccgatcaaagcagaacgtgttacacgtttgtatcataaaggttcattttcacgccgggagctcatggactcagcacgctggaaaacagccagcgcccagctcaaccagttacatgaacgctggcaggaagaaaaagcaggtcattaactcgagttttcgtgagggtgccagatgattatttatttacacggttttgattcaaatagtccgggcaaccatgaaaaagtgttgcaattacagtttatcgacccggatgttcggctggtaagctacagtacgcggcatcctaagcacgatatgcagcatctgctgaaagaagtggacaaaatgttgcagttgaatgtggacgagcgccctttaatctgtggcgtggggctgggcggttactgggcggagcggattggctttttgtgcgatatccgtcaggtggtttttaacccgaacctgttcccctatgaaaacatggaggggaaaatcgatcgcccggaagaatatgcggacatcgctacaaagtgcgtgaccaactttcgcgaaaaaaatcgcgatcgttgtctggtgatcctctcgcgtcatgacgaagcgctggacagccaacgctcagcgcaagcgcttcacccgttttatgaaattgtgtgggatgaggaacagactcacaaattcaaaaatatttcgccgcatttgcaacgtatcaaagcgtttaaaacgctgggataacgccatccggcaatatggcgttatcagtgaccggataaccagccttgcggctggtttttttatgctcaattctcgcaaactgtctatcttttcagcatgaaaacttgatgcacatcaattttggtatgaccaatgcaccgttcatgctattctcatatcagaagcttattctcattaacgtaacttgttgttaattaaaggctatgctaataacttttaattaacaattggttaataaatttaagggggtcacgttgactacaccattaaaaaagatcgtgattgtcggcggcggcgctggcgggctggaaatggcgacgcagttaggccataaactggggcgcaagaaaaaagcgaaaatcacgctggtagacagaaatcacagccatctgtggaaaccattgctgcacgaagtggcgactggctctctggacgaaggcgtggatgcgctgagctatctggctcatgcgcgtaatcatggtttccagttccagctggggtcggtgatggatatcgatcgcgaagcgaaaaccatcaccattgccgagttgcgtgatgaaaagggcgaactgctggtgccggagcgcaaaatcgcgtatgacacgctggtgatggcgctgggcagcacctctaatgatttcaacacgccgggcgtgaaagagcactgtatcttcctcgataacccgcatcaggcgcgccgttttcaccaggagatgctgaacctgttcctcaagtattcggctaatctgggcgcgaacggtaaggtcaatatcgccatcgttggcggcggtgcgacgggggttgagctgtcggctgaactgcataatgcggtaaaacagctgcatagctatggttataaggggctgaccaacgacgcgctgaacgtgacgttggttgaggctggcgagcgtattctgcctgcgttgccgccgcgtatctccagcgccgcgcataatgaactgaccaaactgggcgttcgcgtgctgacgcaaactatggtcaccagcgccgacgaaggcggtctgcatacgaaagaaggtgaatatattcaggccgatctgatggtgtgggcggcgggtatcaaagcgccagattttatgaaagagattggtggtctggaaacgaaccgcattaaccaactggtggtggaaccgacgctgcaaaccacgcgcgatcctgatatttatgcgattggcgactgcgcttcctgcgcacgtccggagggaggttttgtgccgcctcgcgctcaggcggcgcatcagatggctacctgcgcgatgaataacattctggcgcagatgaatggcaaaccgctgaaagcttaccagtataaagatcatggatcgctggtctctctgtccaacttctctaccgtgggtagtctgatggggaacctgacccgcggttcaatgatgattgaaggacgtatcgcccgcttcgtgtatatctcgctataccgtatgcaccagatagcgctgcatggatactttaaaaccggcctgatgatgctggtgggcagtattaaccgcgtcattcgtccgcgcctgaaactgcattaatttctctgcgtctcaccggctgctcgcgccggtgagcgcttctccatcactcgcttcggagttgtccgaatccttcagctttaccgcctcatcccgcatttttcatcctcattccgattggctttgttcgcatactggttgcaaaattgttaccaatagcaacgaaggaggaactcccgtgaataaatcaatgttggcgggtatagggattggcgtagcggctgcgctgggtgtggcggcagtggccagtctcaacgtatttgatcgtggtccgcaatatgcgcaggtgatatcggctaaaccgattaaagagacggtaaaaacgccgcgtcaggagtgccgtaatgtcacggtcacgcatcgcagaccggttcaggacgaaaaccgtattgccggctcggtgcttggcgcagtagcaggcggcgtgattggacatcaatttggcggcggtcgtggtaaagatgtggcgacggtcgtcggggcgctgggcggcggttatgctggcaatcaaatccagggatcaatgcaagaaagtgatacttacactaccacgcagcaacgctgtaagacggtgtatgacaaatctgaaaagatgcttggctacgacgtgacctacaaaattggcgatcagcagggcaaaatccgcatggataaagaccccggaacgcaaattcccctcgacggcaatggccaactggttctgaataacaaagcataaaaaagctgtactctgcaagttagcccctcattcgctcaggctgaggggcttttttttatccgaagccgcgtcgttcaggacttgatcagttcaggccagatgcgcagagtcgtacgcgtaatttgcatcagttgttcgaaggtggcaccttcacgggcgctgatcgacattccctgtaaaatacagtttatatattctgcgagcgcctgcgggttacagtgcgccggaatttcaccgcgctcctgacgttggcgcagaaactggatgagcgtctgttcctgcatggcgtggcgtgattttaccgtgcgggcgatatcgcgcgaggaggcggccagggtggcggacgtattaatcataaagcagccagccggcgtgtctgtactggtaaagcaggcggcaatttctgtgaagtaatcttccagcgccgattctacgcttttctcttcacaaaagagctgggcttcgtgttttgaggcaaagcgagtgatgtagcgatccaggacagcgcgaaataatccttttttgttagtgaattccgcatagagagtaggcgctttcgccccggtagcctctacgagatcggcaagcgaagttgcttcatagccgtgctgccagaagagagtcatggccttatcaagcgcggcttccctgtcgaacacttttggtcggccacggcttttcttcgcgcaactcgtggtatccgttgtcatgatgccgttgtacctgtttaaagagcggtctctctattataaaaacaaaccacttctggctccagagtattcattagaaaaataaatcaattctattcacatgaaaaataacatctttataaattatataacgatcattataaaaagaggttgacgtgtgatgtagatcacatctatgattaacttatcgatcgttaagttaatgcttacgacacccattcatctgctaaaggtcatcactatgaaaaacgtaaaaaccctcatcgctgctgccgtactgagttcgctctcattcgccagcttcgccgccgttgaagttcaggcaacgccagaaggtcaacagaagttcggcaccatttccgcgaatggcggcacgaatctgggctcgctggaagatcagctggcgcaaaaagcgcaggagatgggggcgaagtctttccgtattacctctgttaccggcccgaataccctccacggtacggcggtaatctataagtaagcattaaccctcattaatgccgctgcgattgccacaataaaaagaaaaagcctcgcgatgcatcgcgaggcttttttgtcggtcagctattcacgcttacagcgactgcggtttcgcctctgcttgacgggttacatccaccggcattccggaacgcacttccataacatgttccatcaccgcagcatcggtctgcggcgcgtccttaaaggcctgcatcgggccattcagcacaatcggcaacacctgcggatcgtcgcctatatttttagacagcggctgatgaacttccaccagtcgcacgccgcctggctccaccgaggctttaatcggcgtattgataatattcactttggttcccggcgtgacctgacggaacaatgtctctatatcaccgtcgcgcagacggatacagccggaactgacgcgcataccaatgccaaaatcggcattcgtgccatgtaacagatagacgccgccgtaggccgctaaacgaatcgcgtgatgtcccattgggttatcgggaccggcaggcaccacggcggggagatcgataccttgcgctttataacgggcgcgaatattggcggtcggcgtccaggttggattggcgcgtttatccgaaatggtcgtcaccatcgttggcgtcagggtatcgccgcccagttggccaatcccgatagggtagaccgtgaccgtatttttccccggttgataatagtaaagccgtaattccgcgaggttaatgacgataccttcacgtggcgcgtccggtagcagcgtttgcagcggaatcgttagcacgctgcctgcgcgtggcacataaggatcaatgccggggttggcctgtaacagggctaaaaagcccacgttatattttttggcgatcgcctccagcgagccgccgtcgtcttcaacgacatggaatttattttctcccaccagtcgactgccggggggcggaagaggccacgtattcgcctgcgcgggaagggcaagcatgatggtcgcggtaagcgcaagcaacgcccaccagcgagagagtcgcgtattgttgaacattataataaacccatgattattatgtggttatttttataaaagaggaaataagaattatggcggttggctgtgtctggaactgcagggaagtgcaaagaatttgtaaagattaggccggacgcagagtaatgacgcccggcctgacgcttatgcaatagcgttttcttccagttgctgcataaactggcgtacccagtctatacgcgttttacgttcgcttaaatcctgaataaacttgaggcgcgtcgggccatccagacggaaatgctgcggctgtttttgcagcaacccgataagccaggcggggtcaacgtggtttttctcggcgaactcaatcgttccgcctttctcgttaccctccagttttcggatgccgagcttttgcgcctgttggcgcaggcgggcgatatccagcagattacgcgccggatcgggcagcaggccgaagcggtcgatcaattccactttgatctcctccagctcgttttcgttcttcgcgctggcaatgcgtttatagaatgacagccgggtattaacatccggaataaaatcatccggcagtaacgacggcattcgcagctcgacttccgtttgctgactggtgagatcttccagcgagggttcgcggcctgctttcagcgcatcaacggcgttttccagcaattccatgtagagtgagaagccgatggtttccattgagccgctttgctcttcgccaagcagttcgcccgcgccgcggatctccagatcgtgggtcgccagcgcaaacccggcgcctaaatcctccagcgacgcaatcgcctccagccgtttttgcgcatcggtggtcatggccttaggatgtggcgtcaacagccaggcgtaggcctggtggtgcgagcgcccaacgcggccacgcagctggtgcaactgcgcgaggccgaaatgatccgcgcgttcaatgatgatcgtgttagcggtgggaatgtcgatccccgtttcgataatggtagtacacaccagcacgttaaaacgttgatggtggaaatcgttcatgacccgttccagctcacgttcgcgcatctgcccgtggcctatagcgattcgcgcttccggcaccagttccgccagccgctctgcggctttctgaatattttcgacgtcattgtacaaatagtaaacctgaccgccgcgcaggatttcacgcagaatcgcttcccttaccaccaggctatcatactcgcggacaaaggtttttaccgccagacgacgggcagggggggtggcgataatggagagatcgcgcataccgctcatcgccatattcagcgtccgcgggatcggcgtcgccgtgagcgtcagaatatcgacatcggcgcgcatcgccttaattcgctctttgtggcgcacgccgaaacgatgctcttcatcgacaatcagcaggccgaggtcgcgcagcttcacatcgctttgtagcagtttatgcgtaccgatcagaatatcgatcttaccctcggcggcttccgccaggatttgtgtctgctctttggcgctgcgaaagcgggacagcatctcaatgcgtaccggccagttggcgaaacggtcgcggaagttgtcatagtgttgctgcgccagcagcgtagtcggcaccagtaccgctacttgtttatggttttccactgccaggaacgcggcgcgcatcgccacttcggttttgccgaagccgacgtcgccgcacaccagcctgtccatcgccagcggttggcacatatcgctcaatacggcgttaatcgcctgtgcctgatcgggcgtcgtttcaaacgggaagctgtcgcagaataactgatactgctcacgatcatgcttaaaggcaaaaccctcttttgccgcccgttgcgcataaatatccaacagttccgctgcgacatcgcgcactttttccgccgctttctgccgggcgcgcgaccaggcgtcgccgcccagtttatgcagaggcgcactttcttccgcgccgccggcatagcggctaatcagatgcaatgaggagaccggcacatacagtttggcgtcattggcgtaggtgagcatcagatactcacccttgatgccgccagcctccagagtggtcatgccggcatagcgtccgacgccgtgctccagatgcactaccggctgaccgacgtggagctccgccaggttacgaatcaacgtatccgggttgatcgtgcggcgggaatccaggcggcgacgcgccacccgctcacccaaaagatcgctttcacaaatcagcgccagattgcgttgggtgtcgataaagccatgttctgcggcgccaatcatcagatagcgtcccgcatcctgcgcctcgtccaggcgtaatatccgcttcggcgcgatttttatgcgagccaggagctctcccagagcttcgcggcgtccttcgctttccacagaaaaaatcaccggaccgctgaaagattcgaggaacttacgcagcgcgtccagcggcgctttctgctgcgcctggatagccaaatccggtaatttctggaaaccgagattggtattggcggctttttccggcagatggtcggttttaagctggaggcgaggccagcgtttaagctcggaaaagagctcatccacccgtagccagagggcttccggcggcaaaagcgggcgcataggatcgacgccacgattttcaaaacgcgccagcgtatcggcctgaaagcgttcggcgctggtttccagcgagccggtattcaccaccagagtattggcggggaaatagctaaataatggcggtaacggttcgctgaaaaagagcggctgccagtattcgatcccggcgggcagagtgcctttgctgacctgctgatagatgtgctcggcgtcgcgttttacctcaaaggtatcgcgccactggctacggaaaagctcaatagcggctttgtcggtaggaaattcgtgcgcgggcaacaaattgatggcctcgacctcctccagcgtacgctgggtatccgcgtcaaacagacgcaggctgtcgatttcatcatcaaaaaagtcgaggcgataaggctgttcgctgcccatcggaaagagatccaacagcgcgccgcgcgtcgcgtattcgccatgctccatcacctgatcgacatgccgataaccggcgctgtcaagctgcgcgcgcagagcgtcgcgggacagccgctggccttttttcatcaccagcgcatgaccatgcagatagctatgcggacaaacgcgctgcatcagggtgtttaccggtacaatcaagacgccgcgctgcatcgacggcaactggtagagcgtggacaggcgcgaagagataatttcctgatgcggggagaagctgtcatacggtagcgtttcccagtccgccaggttcatcaccatctgatcggtaaactggcggatttcatcatgcaatcgcagagcattttgcatgtcaggcgctatgagtaccaccggaccggcatggcgttcggctatctccgccaccagcgtagcgcaggcggcaccggtaagttcgcccaactggcgctgatcgcccgcttttgtcggcagcgtgtaacgttgtttttcaggcataacggttgtcagtatctctttttgttttacgccgcactctacgcgtcacccttcaggctgcttcatggttggctgcacgccgggacagcatgaaggactcaggtattcaggggcatatgactgataagcaatgttctttattatccgcgatcgttgtttattagcaaattgaatccgccgcataacgcgccgaacaggtaaagtatgaacatgtaagtgacttgatttgtcggcctttttcagaataacgctgacgaactcttacggttcagacatttacgcattccgctttcgcttatatactcgggactttgctaacagcaaccagacggattacatgtatcaacctgtcgctctattcattggcctgcgttacatgcgcgggcgtgcagcagatcgcttcggtcgcttcgtttcctggctttccactatcggcattaccctgggggtgatggcgctggtcacggtattgtcggtgatgaacggttttgagcgcgaactgcaaaataacattcttggtttgatgcctcaggccatcctctctgctgaacatggttctcttaacccgaatcagatgccggaaaaagcggtgaatctgcaaggcgttaaccgtattgcgccgctgacgacgggcgatgtcgtactgcaaagcgcgcgtagcgttgcggttggcgtgatgttaggtatcgatccggcgcaaaaagatccattaacgccgtatctggtcaatgtgaagcaaagcgaattacagccgggtaagtataatgtcatcctcggcgagcagctcgccggacagttaggggtcaaccgcggcgatcagattcggctaatggtgccatctgccagccagtttacgccaatgggacgcctgcccagccagcgtctgtttacggtgattggcacatttgccgccaatagcgaggtcgatggctatgaaatgctggtcaatattcaggacgcgtcgcgtttaatgcgctatccggcaggcaatattaccggctggcgtctgtggctggatgaaccgctgcaagtcgataccctcagccaacagacgctgccgcaaggcacgaagtggcaggactggcgcgaacgcaaaggcgagttgttccaggctgtgcgcatggaaaagaacatgatgggattgttgctgagcctcatcgtggcggtcgcggcttttaacattattacttcgttgggcctgatggttatggagaagcagggtgaagtggcgattttacaaactcaagggctgacgccgcgacaaattatgatggtctttatggtgcagggcgccagcgccgggattatcggcgcgctgttgggcgccgcgctgggcgcattgcttgccagccaactgaataacctgatgccgatcatcggcgcgtttctggatggcgctgcgttgcccgtggcgatagagccgttacaggtgatcgttatcgcgctggtggcaatggccatcgcgctgctttctacgctttatccttcctggcgcgctgccgccactcaacccgctgaggctttacgttatgaataagatcctgttgcaatgcgacaacctgtgcaaacgctatcaggaaggcaccgtacaaaccgacgtgttgcacgatgtcagcttcagtatcggcgaaggcgaaatgatggcgatcgtcggcagttccggttcgggtaaaagtacgttgctgcatctgttaggcgggctggatacgcccacctccggcgatgtgatttttagcggccagccgatgagcaaactctcttctgcggcaaaagcggaattacgtaaccagaaactggggtttatctatcagtttcatcatctcctgccggattttacggcgctggaaaacgtggcgatgccattattgattggcaaaaagaaaccggcggagattgacgctcgggcgcgagaaatgctgcacgccgtagggctggagcatcgcgcaacccatcgaccttcggaactttccggcggtgagcgccagcgtgtcgcgatagcgcgcgcgttggtgaataacccgcgtctggtgctggcggatgagccgaccggtaatctcgatgcgcgtaatgccgacagtatttttgagcttctgggcgagttaaatcgtctgcagggaaccgcgtttctggtggtgactcacgatttgcaactggcgaaacgtatgagccgccagcttgagatgcgcgatggccgcctgacggcggaactgagcctgatgggggctgagtaatggcgtcgcctttatcattgttaattggcttgcgtttcagccgtggacggcggcgcggcggtatggtttcgctcatttccgtcatttctaccatcggtatcgcgctgggcgtggcggtgttgattgtcggtttaagcgcgatgaacggtttcgaacgcgagttgaataaccgtattctggcggtggttccgcacggggagattgaagcggtcaatcagccgtggaccaactggcgtgaagcgctggcaaaagtgcagaaggtgccaggcattgccgccgccgcgccgtatatcaattttaccggcctggtagagagcggggccaatttgcgcgccattcaggttaaaggcgtcgaccctaagcaagagcagcagcttagcgcgttaccgtcatttgtgcaaaatcacgcctgggatcatttcaaagcgggcgagcagcagatcattatcggtaaaggcgtcgccgatgcgctgaacgtgaaacagggcgactgggtgtccatcatgatccccaatgcgaatgccgaccataagctgctccagcccaaacgcgtgcgtttgcatgtcatcgggattctgcaactgagcggccagctcgatcacagcttcgccatgatcccgcttgaggatgcgcagcagtatctggatatggggtccagcgtttccggtatcgcgcttaaagtccacgacgtgtttaatgcgaacaaactggtgcgtgacgcgggtgaagtgactaacagctatgtctacattaagagctggatcggcacctacggctatatgtatcgcgatatccagatgattcgcgccattatgtatctggcgatgattctggtgatcggcgtggcctgttttaatatcgtttccaccttagtgatggcggtaaaagacaaaagcggcgacattgcggtattaagaacgctgggggcgaaagatggtttgattcgtgccattttcgtctggtacgggctactggcgggcttgctgggcagcttgattggcgtggcgatcggcgttgtcgtttcgcttcagcttaccgccattattaatgggattgaaaaggcgatcgggcatcagtttttgtccggcgatatctattttatcgacttcctgccatccgaattacattggctggacgttgtttacgtactggtcacagcgttgttgttaagcttactggcgagctggtatccggcgcggcgggcgagcaacattgaccctgcgcgagtattgagcggccagtaatcgcggaatataaaaacaaggagcggtgatgtattacgggtttgacattggcggaacaaagattgcgttaggcgtatttgactcaacgcggcggctgcagtgggaaaaacgggttcccacgccccataccagctatagcgcctttttagacgccgtatgcgaactggtcgaggaagccgaccagcgatttggcgtaaaagggtcggtagggattggcatacccggtatgccggaaaccgaagacggcacgctgtacgccgcgaatgtcccggcagccagcggtaagccgttgcgcgccgatctcagcgcccgactggatcgcgatgtgcgtctggacaatgacgctaactgttttgccttgtccgaagcctgggatgatgaattcacgcaatatcctttggttatggggcttatcctcggcaccggcgtcggcggtggcctggtgctaaacgggaagccgattaccggtcagagctatatcaccggcgagtttggtcatatgcgtttgccggttgacgcgctaacgttgatggggtttgattttcctctccgccgttgtggatgcggtcagatgggctgcattgagaattatctgtccgggcgcgggtttgcgtggctatatcagcattattatgatcaatcgctgcaggcgccggagattatcgcgttgtgggagcagggcgatgagcaggcgcacgcgcatgttgagcgctatctggatttactggcggtttgtctggggaatatactgacgattgtcgatcccgatttattggtgatcggcggcggactatcgaactttacggcaataacaacgcaactggcggaaagactgccgcgccatctcctccctgttgcccgcgcgccgcgcattgagcgtgcgcggcatggggatgcaggtgggatgcgcggtgctgcttttttacatcttaccgactaatcaaaaaaagaggttgttatgcagtcgcgtcggtttcatcgattaagccgctttcgtaaaaataaacgtctgttgcgtgaacgtctgcgccagcggatctttttcagagacagagtggtgccggaaatgatggaaaacccaagagtattagtccttacaggtgcaggaatttctgcagagtctggtattcgtacgtttcgcgcggcggatggcctttgggaagagcatcgggttgaagacgtggcaacgccggaaggattcgcccgtaatccggggctggtgcagacattttataatgcccgccgtcagcagcttcaacagccggaaatacaacccaatgcggcgcatctggcgttagcgaagcttgaagaagcgcttggcgatcgctttttgctggtgacgcaaaacatcgacaatttgcatgaacgcgcgggcaatcgcaacatcattcatatgcatggcgagctgttgaaggtgcgctgttcgcaaagcggccagattctggaatggaacggcgatgtgatgccggaagataaatgtcactgctgtcagttcccggcgccgctacgtccgcacgtggtgtggtttggcgagatgccgcttggcatggatgaaatttatatggcgctgtcgatggcggatatttttatcgccattggcacgtccggtcatgtctatccggctgcgggttttgtgcatgaagcaaaactgcacggcgcacatacggtggaactgaatcttgagccaagccaagtcggcagcgagtttgaagagaagcactacggcccggcaagccaggttgtgccggaatttgttgataaattcctgaaagggctgtagtgctgtttgcccggtaacgccttatccggcctacatttcacgttacgttcatctgtaggcccgacaggcgctttggctgaattagcgtcctgcttttagcttctgataatactcttcataaatggcgctggcgtcgccgacatcgttttgccactcgcctttgctgatggtttgcgcatccggatagagcgacttatcattggcgacctccgggcttaacagcttacgcgccgccaggttgggggtagggtagccgatggtttctgccacctctttcgcgacgtcaggacgcagcaggaagttgattagcttcagcgcgccctctttatttttcgcgtttgccggaatagccaggctatccatccagaaaataccgccttctttcggccagacgacctccagcggcgtgccagcctgacgagcaacgaaggccgaaccgttccacaccatccccagattgacttccccttccatatacggattcgccggattatcggagttgaaggccgctacgttcggcatcagttttttcaactcttcatatgccgcttcgatctctttcggatcggtagtgttaccggaataacctagcttgcgcagcgccatctggaagacttctcgcgcatcgtcggttaaaagcaggctgtttttatattccggtttccacaagtcagcccagctggtaatggtttttggatcgatagcatcgctgttcacgccaatcgccgttgcgccccagatatacggaacagaataatcgttgttggggtcaaacggtttgttgagcatttccggatcgaggttgtggaaattggttaatttcgacttatcgatcttctggatcatgccttctttgcgcattttgtcgacatagtatgtagaaggaacaaccaggtcatacgcgccatctttataggttttgagtttggcatacatggtttcgttcgactcgtaggtcgaataaatcaccttaatgccagtctctttagtgaactgttccagcaggcccggcggcacatactcagtccagttatagaaatagagcgtgtcgttgtcggaggcatgagcggcactcatacccagcgccagggcgcccgccgcgagcaggtggcgtgaccattttttcatttaacgtcccctgaattacgggccttatcggcccttggttttatcacgagcaataagctggctggcaatgaccattaccagagacagcaccaataaaacggtcgccagcgcgttcacttctggtgaaacgccgacttttaccatggaataaatctttaagggtaaaatttcatagcccggcccggtgacaaacgacgagaccactacatcgtccatcgacaacgtaaagctcagcaaccagcccgccgccaccgccggcatcgccagcggcagaatgattttgcgtaaaatcgttacctcactggcccccaggtcttttgcggcttccagcattctgacatcaaagcctttcaggcgcgaatagaccgtgacgaccacaaacggcaggctaaaggtgatgtgcgagaacagcaacgaccaaaagcccagttgaatgccgagtaacataaacagcaccagcagggagatcgccatcacgatatccggcgacatcattactacaaacagcatcccgctgacgaatggcttcccgcgaaagcggtagcgataaagcgccaccgcggttaacgagccaatcaacgtggcgaaggtcgctgaaaaaatcgccatcgtcagtgaatgttgagcggcctgcaacagactgtcgttattgactaggagttcgtaccatttagtggtaaagccctgccagttaatgccgaaccgcgaactgttgaaggagttcacgatcagaataatgatgggaatatacagatacgcatagatggcagtcatgaaaccgccacggagcagccgaccgatcattcaagttccaccttcttattcagaggatggggtgcttttagagtattgaaaatgatcaattttttctcttctccaaaatctctccaaaacgtctcgcggttatcagcagccaggaagaagcaagctgccgcttgaagccgcgaattttacaacaaattgccagacgagcgggaaaaaaaggccatttaaatgactattctcatccgatccggtcatatgcggcattattgtgcctggcaagaggttactcagtaggcaaacaggaagtacgtgagtaaaccctgaacgtgacgtctgagaaagcgtcgtctgattttataaaaaacaacataaacagccgctttgttgttctgagcgaacgtgtagcgtggttaactgttcttccgccattttttgtatagcctgggggtctattctaaaaatggcgtgaaaaacctgatcagagatggcttcgactatctcagctaacatactttggctggtgctgggatccgttacgaggaacgcctgaaacgtcttatccgctagtaaaacctcttttaccattttttcaataggtatgtgggtatgcggtggtggtatttcaagctgttttaatccacacatcgccattgtttctaaaaatgcgttttgctgagtactttcggatatattcgcatggtgtaaaatgcgcgttgtcttttcaatcccagactgaattttcgctgccaggtaggttgccttttcttgcgctttccacccatctaaatgtccttttctcaattcagtatataaatacccctctatgttgtctaatggaaccgataatatcggcgcgccagcaggattgagacataatgtcgaagggagggggtagtctacgatttcgctatatcttctcttaatcatggccgtcatttgtggatgcgattttaaaatatccgggcgatctttcattaaaaaataaagattccccatgacttcacagctaaaggtatcggtattttgagtgatacgtaacaattcgttctcttcgttttgatccatgatgcgaagaataatggtggcatcattttcatgaggattatgaacctgaaatctatctctttgcgatgcgcaggctaactctttcaactcaaaaaaaatctctgtaagccgctctcgtgtgggggcgcgttcggcaaacaacatctcatgtagacaacggtccgcttttgctttgccagtagaaaaaaagaagtctttaattttttcccataaaactttccaccatgcttctttcgtattccttggggagttggtaaggatttcactttttaaaaaaccattccctatagtaatcggcatattaatctcacttatactggagtaaaaatgactacataattgattaaatcgaccctttttatctcaactgcgggcgcatcggatgtaatataatttttaaaagagactggcaatcagtataaaacctgagagcttcgcgtataaacgcattactgtctgtgatagcgtcgctacaggtaaaaataaaagaaggactaccgcggatgatgttgtagatttgcaatactggcggcaacttctttcatgcgttttttatgccgaaggcatgaagtttacccttgaataaacttcatgcctggatgcgtgtggatttgttagcgttgcgcaattaatcgcttatatcactcaccttcttattcaataagcgggaagcccgccagtaaatcaacagcatgagtcccatcacaatggtcagcgtaatgctggtagccgcgccaaacggccaatcgcgaatattcaggaactgtaccttaatgacgttaccaatcagcaggtttttcgcgccacccattaaatcggagacgtagaacaggcccattgccggtagcatcacgagcaggcaaccggcgacaatgcccggcatggttaatggaataatgatgcggatgaacgtttgcattttactggcgccgagatcgcgtgcggcctccagtagtggtttgtcgagcttctcaatgctggagtagagcggcatgaccataaatggcagcaaaatgtaaaccaggccgataataacggcgctcggggtgaacatgatgcgaatcggtgtatcaatcacgcccagccacagcaggaattcattgagataacctttagtgctcaggaatattttcagcccatagatgcggatcagtgagttggtccagaaaggaacaatcagcaaaaacagcaataacggacgtatcttttccggtaacttcgccagaaaccaggcaaaaggatagcccagcaccaggcaggagagggtggcgatcagcgccatattcagagagtgcaggagcacttcaaaatagagcggatcgagcaggcgcgcgtagttatccagcgtaaagaccatcttgacgaaactggcgtcgtcacgggtcagaaagctggtgccaatgatcatcaggttgggcagaaaaacaaataacacaagccaaccgacgatagtgacaatcactacattctggaatttacttgtgttcttcatcagccagtacgacctcccagctttctacccaactaatggccattttttggtcaagtgaatggtcgaagtcaggatcgtcttcgttgaagaattcgctgaccatcaccattttgccattttccagttcaaccaccgactccagcgtcatacctttataattgcgctcgcgcacgtagccgataagcccttcgatgtggttatcatcgttgatctcttcgacgcgtagatcttccggtcgcagcaggacgttcagtttttggcctggttcgacagcgaaattgacgtatatattgcactcccgaccttctacgctggcgcggacgcgctgttcatcaagccgttcaatgacggttgcgtcaaagcggttaatttcgccgataaaaccggcgacaaacaggttttttggctcttcatagatttcacgcggcgtgccgtcttgctcaatcacgccattacgcattaccacgatacgatcggacatggtgagcgcttcttcctgatcgtgagtgacaaaaacaaacgtgataccgagtttacgctgtaatgctttaagctcgttctgcatttgtttgcgcaatttatagtccagcgcggaaagcgattcatccagtaataacaggcgaggtttattcaccaccgcgcgagcgatagccacacgctgctgctgtccgccggaaagctggtgcggtttacgttgtgcaaactcttcaagctgcaccatacgcagcgcatcggtcacgcgaggcgctatctcggcggctggcgttttttgcatccgtaagccaaacgcgacattttcaaacaccgtcatatgcggaaataaagcgtagctttgaaatacggtatttacataacgattttcggcgggaacgtgggtgatatcctggttatccaacatgatatgcccggcatcaacggtttccaggccggcaatcaggcgaagaacggttgttttaccgcagccggaagggccaagcagcgtgaggaattcgccattgttaatggtcaaatccagttgcgaaatgacctctttgccatcgaaacttttgctaattcccgacaaaagcaccagcggtgaaagcgaacgcggttgattattcaatttcttactctgtcccatgtaaacgcaacggatggctgaccgctgcggggtttgtggttaaccaccttaatcactcttaatgagggcggtcattctacggcaaaccactgtgatcgccaatccttgttgcgaattactgacttagctttatagtcagaaagcgtgtcaaagtgaaatattcttgtttgcagggataaaagtgacctgacgcaatatttgtcttttcttgcttattaataatgttgtcacgaaaagtgagggtgactgcatggataaactacttgagcgttttttacactacgtatcgctggatacccaatcaaagtcgggtgttcggcaggttcccagcactgaggggcagtggaagttactacgtttgctcaaacagcagctcgaagagatggggctggttaacattacattaagtgaaaaagggacgttgatggcgacgctcccggccaatgttgagggggatattcccgccattggttttatctcccatgtggatacctctccggatttcagcggtaaaaacgttaacccgcagattgtcgagaattatcgcggcggcgatatagcattagggattggcgatgaggtgttgtcacccgtgatgttcccggtactgcatcaattactgggacagacgctgattactaccgatggtaagacattgctgggcgcggacgataaagccggcgttgcggagatcatgaccgcgctggcggtgctgaaaggtaatcctattccccacggcgacattaaagtggcgtttacgcctgacgaagaggtagggaaaggcgcgaagcacttcgatgttgaggcctttggcgcgcagtgggcatatacggtcgacggcggcggcgtgggagaactggagtttgaaaacttcaatgccgcctcggtgaatatcaaaatcgtcggcaataacgtgcatcccggtacggcaaaaggcgtgatggtcaatgcgctgtcgttggcggcgaggattcacgcggaagtgccggcggatgaagcgcctgaaaccaccgaaggttacgaagggttttatcatctggccagcatgaaaggcaccgttgaccgggccgaaatgcactacatcattcgcgatttcgaccgtaagcagtttgaagcgcgtaaacgcaaaatgatggagattgccaaaaaagtcggtaaggggctgcatccggactgctatatcgaactggtgattgaagacagttattacaatatgcgcgaaaaagtagttgaacatccgcatattctcgatatcgcccagcaggccatgcgcgactgtcatattacgccggagatgaaaccgattcgcggcggtacagacggggcgcaactgtcgtttatgggtctgccatgtcctaatctctttaccggcggatataactatcatggtaaacatgagtttgtgacgctggaggggatggaaaaagcggtacaggtgattgtgcgtatcgcggagctgacggctaagcgcgggcagtagcgaatgttacgcattgtggtgaagcgttttattatttatggcgggatattttccgccataaatttttgtctatggaaaacccccagctaggctgggggttccggaaagctttcagctttaagccagttattaaaaccccttttgatttgttaaaacatcttgcggtctggcaactgcaaaagttcaacaagaaatcaaaagggggtcccaatgggggacgaaaagagcttagcgcacacccgatggaactgtaaatatcacatagttttcgcgcccaaataccgaagacaagcgttctatggagagaagcgtagggcagtaggcagcatattaagaaaattgtgtgaatggaaaaacgtacgaattctggaagcagaatgttgtgcagatcatattcacatgcttctggagatcccgccgaagatgagtgtgtcgagtttcatgggatatctgaagggtaaaagtagtctgatgctttacgagcagtttggggatctaaaattcaaatacaggaacagggagttctggtgcagagggtactatgtcgatacggtgggtaagaacacggcgaagatacaggactacataaagcaccagcttgaagaggataaaatgggtgagcaattatcgatcccgtatccgggcagcccgtttacgggccgtaagtaacgaagtttgatgcaaatgtcagatcgtatgcgcctgttagggcgcggctggtaagagagccttataggcgcatctgaaaaacctccggctatgccggaggatatttattctgcctggagcgccgaatatacgccttcctggtcccagcgccagcaacaatctgcagcatgttttatgactggcgatgaaacctgcatgacgtttattgatgatgcggtgaggctggcctcgcagcaatatggcaaacgctcaatacagcttgttcgtagcctgctattacaaagcgatatttatcaatggctgggtaaaccggagttaacgccgcaaatgctgctgcgagcgcgggcaataatgaaaacatttccggcggacacttatccgggcgatcgggccgatatgtttgaacacctggcggcctttaatgtttacagtgacgatcgttatatagagtattcaccgacagagcagtggcgatacgagatcaaggttgattaccgtcagcagatagcctggcaagagcaggcattaacgtggcgtcttaaagacaaaaaggcatcgacggaagcattggtttataccttaaacaggatgcgcgacgcttattctgatgcgctggaagagcgggatgtcgaatgtgatagtgcgcgtaaagcctattatttggcgaagatagacgcaacggagcggcagtggctgagcgttattttacgagataaaacctgggataatcgtgagcgcgtcgcctcttttttgcagcagaaagcggatattgcttataatgcagggcatattagcgaggcgattaatgcgctaagtcaggcgctaaaaattgagcaaacgctttatggcgccgaattcggcgaaatgacggttgacagcaataatcttgctggcttttatgcacagggccatcattataaggaagcgaaagatctctaccttaaacttatcgcgtattaccagagccgtttaacgccaatggcgacggtaatatcacgattacgcttttatttgcccgaaaacatcgacctggacagtacctccctctatctcccattgctggcagaatataaacgtcggcagtccgacgtatcaatggtgttgtatggtatttcgctgctttatcagagtaatcaagaacttgaacaagcaaaagactttgcggaacgcgcctttacgcttgatgccgtagcttatccagcaaagatgcagtatgaacgattacagcaactggctaatattgccgaaggtcttggagataacgtactggcgcggcgctatcggcaaatgtcatttcgccatcgaatggcccactcgatttatccgggcgatccgcaatataacgatgtcgccaaacctggcggcgatcgttgtggatagtttgcgtcagcccggcggtcgccgggcattgcgatgttcttatccttcgaagaaccagtacccgctattcaccagcgccgccagcatcgcgaggaaggacgggtcttccagcgcatcgccgaagttttcagcggtcagtgcaatatgactggcgagcgcctccagagcggggcgatgcggagagtctattttttcgccattcgcatagacctcatcgccgatacgcaatacgcgaagcccgccgagacgtactaatacctcgccttgctttaaggcatcgtaaatttcatcaggctgatacggcggctccggcggcgcaatatccagttcgtggcgtgactgagagagaaactcgccaagccactgttggaaatgcgcgggttgattgatcaaatcgagcatcatattacgcagtttatccatctcctgcggcaggatatccgccggatgcttgcgggacggcatatccggatcgctgtagtatgtattgcccaactcccgttgcaggacgtaatcggcaaaaccgctgatcagctcacggctattgggcgcgcgaaaaccgaccgaatagttcatggcgttttccagcgcatagccttcatgcgggaatcctggcggaatatacagaatgtcgcccggctccagctcttcatcaataatggcctcgaacggttcgacttgtaacaggtcgggatgtgggcagtgctgacgcatttgcagcttttcgcccacgcgccagcgacggcgaccggttccctggataataaacacatcatactgatccagatgcgggccaacgccgccgccgggaacggaaaaggagatcatcagatcgtcgatacgccagtccggcagagcgcggaacgggcgcatcaacgcggcggtgggttcgtgccagtggtttaccgcctgtaccagcagcgaccagttgctctcacccagatgatcgtagctttcgaaaggaccatggctgacctgccatttgccatcctgatggctaacgagtcggctgtcgatttcgctttccatcgccagccccgccagctcatccggcgagagcggatcgataaagttgctaaacccacgttttaagaccaccgggcgtttttgccagtggcgttcaagaaagtcgggccagttaagagttaattggtattccatgttaagtatccgcaggctggtatctgacaccgattataacggatgcttaacgagatgcgtggaagaacgcacagaaatgtttattcctctttctgtgtgggatgctgtcggccaaaaacgacctccatacgggcgccaccgagcagactgtcgctggcaatgatctgcccggcgtattgttccgtaatctcgcgcgcgacagccagccccacgccttgtcctggtcgtagggtatcggcgcgctgaccgcgatcaaacaccagggaacgtttgctgtggggaatgcctgggccgtcatcttcgacgaaaatatgcaaatgatcgtcggtctggcgagccgaaatctcgacaaactccagacaatatttacaagcgttgtccagtacgttgcccatcacttcgacaaagtcgttttgctcgccgacaaaactgatttctggtgaaatatccatactgatattcacccctttacgctgataaactttatttagcgcagaaatcaggttatctaacaacggcgcgacgggatgcagttcgcggcttaacaacacgccgctaccgcgcatactggcgcgatgcagataatagccgatctgctgggaaatccggctgatctgttccagcatcaccggttcagctttgctgacgctcatcttttcgttgcgtaaagagcgtaacgtactctgcaaaaccgcgagcggcgtttttaaactgtgcgtcaggtcggtcagggtcgtgcggtatttgttataacgttcacgctcgcttttgagcagttgattaaggttgcgcacaaggctggtcagctcacgcgtcgtctccggattgagcatttcgcggtgatgatcttcaagctcgcggacttcccgcgccagcgcctcgatagggcgtaagctccaccaggcggcgatccacagtaaaggaatgactaacagtaaattggcggccagcacgtatacgaaccagctccacaccatataggagcgttttagttctatcggaatggtatcgaccaccacgatggttaactgcggcatccgcgccgtggcaggataaatatttaccgctaccgagtgggtcatctcggcatcatcgtcatcttcacgtacttctttgagtttttcctgcgcggaatggtcttcgctcaacagcgtgctggtggcgtctacgttggtttcaatttcatggaagccgttcgtttttaaccattccggttgaatgcttttaatcagccagggaatgttgcgctgcgtccataataatttgcccgtttcatcgtaaatcagcgtcatggtcgggctttgcatgtccagattttcaggcagctcaacgctgattttattattttcccatttggcgagggtataaaacaggttgctttcgccgcgcagcaaacgaaaggtggttttatcaaaacttacgctatagccgaccagcgccactatgccatatgccaaagaaagcaccagcacgacgccggctgtcgccagcaaaaaacgaacccgcagcgacagcggcagaaaatggcgagcaaatttattcattagcgcaattcaaaaagatatccttgtccgcgtacggtggtaatgacatcgtgcggatactgggcctgtatttttttccgcagacgccccatgagaacatcaatggtatgactttcccgcagttccgcatccggatacagctgaagcatcagcgaatctttgctgaccactttaccgttgttacggataagcgtttccataatggtgtattcgaacgccgtgagtttgatgacctcttcattgacggataattcccggcgtgagagatccacctggaacggcgggatgttgatcacctgggaggccagaccgctattacggcgcattaacgcctgcatacgcgccattacctcttcgatgtggaatggcttcgtcacgtagtcatcggccccggagctgagaacctcgactttatcctgccagccttcgcgcgcggttaacaccagaaccggcagtgaaacatcactgctgcgccagcggcgtattaaggaaaggccgtcttcatccggcagacctaaatcgacaatagcgatatccggaaggtgttcattaaggtagtaatcagcttccctggcatcttctgcggcatcgacctggtgacctgaatcctggagctgaaccttcaggtggtggcgtaataatgcattatcctctacaaccagtacgcgcatcatctcttctcccttgtgttaacaataagaacagtctagcgttgattatggtgctttggggataaacagttaataaaccagacaaatagtcaccctctttctgaagaaaagagggtgaggcaggcattatttaagttcgtcgaccagagtcacagcgcgaccgatataatttgccggcgtcatggctttaaggcgcgttttttctgcttccggcagggccagactatcaataaactgtttcattccttcggcatcaacacgcttgccacgggtcaactctttcagtttttcatatggtttttcaataccatagcggcgcatgacggtctggatcggttcggctaatacttcccagttgtgatccagttcgtcaagcagatgatcgcggtttacttccagcttgctgacgcccttcagggtggactgataagcgataagcgcatagccgatgccgacacccaggttacgcaggacggttgagtcggtcagatcgcgctgccagcgggaaaccggcagtttgtttgccagatggtgcaacactgcgttagacagaccgaggttgccttctgagttttcaaagtcaatggggttaactttatgcggcatggtagaagaaccgatctccccggcgatggttttctgtttgaaatggttcaacgcaatatagccccagacatcgcgatcgaaatcgatcaggatggtgttaaagcgcgcgatacagtcaaacagttccgcaatataatcatgtggttcaatctgggtggtgtaagggttccactggatgcccagcgaggtgacgaactcttcgctgaactgatgccagtcaacttccggataggcggcgatatgcgcgttatagttgcctacggcgccgttgattttaccgaggatctccacctggttgagctggcggaactgacgctccatccgatacgccacgttcgccatctctttacccagagtggaaggtgttgccggctggccgtgggtgcgggagagtagaggaatatcgcgatactgcgtggcgagatctttaaccgcgttaatcacctgacgccagtaaggcaggatcacttcatcgcgcgcggttttgagcattaacgcgtgcgacaggttgttaatgtcctcagaagtgcaggcaaagtggataaattcggaaacgtcatgtagcgccgggatcgcggcgactttttctttcaggaaatactcaactgccttcacatcatggttagtcgtacgctcaatggttttaatgcgcgcggcatcttcttcattgaagtttgccacaagcgtatccaggtaaccgtttgcgtcggcagcaaaagcaggaacttccttgatcgctgcgtgcgcggctaatttctgcagccaacgtacttcgacttgtacacgaaatttcagcaaaccgtattcgctaaaaattccgcgcagcgcgctgactttatcgccgtagcgtccatcgacaggggaaacggcggtcagtgaggataattccatagatcataactccggggttaaatgagcaagaatttgttttgcctgagtcgtcaggcgatgacgagaaaacataagctgtaggcgaccaccgcctacctgatgccagagcacggctgcacggatgcctgccagtagcgaggcgcggactttggcctgcacctgcggactttgcagaacggccggggagcccgtcacctgaatgcgcgggcccaatgggctaatcacatccacgtagatgcccgccatggcgctcattaacgtgtctgactgtaaatcaaaatgatcaagctggcgctgcaggccgttaatgcgatcgcctaacgtattcaatgcgcctttggcggatgacagcttgcgctccagcaccatcaggctaagcgtataacgcgtcagttcggcgttaagtccttgtcggctgctggcattcagcacgccgagcagtgtttccagaccaagacgcaggttggcttcgctgccgccgaacacgcccagagtagaactgggattcatatcaatgacactgttgagtgaaacgtgcaacgcgtcggcatcacagtgtccctggtgcgccagttgttgcaccaggcgtgccgactggcaaatgccagacagcgcgagggtgatgtcataataattctttgccacaatcactgcttccttgtatcaaataaaatacacttcatcttttaagccgctttgaggcgacttgaatggtgttgtgtattgaataatcagaccgtcagcggcagtcgctgctcgataatgccgccgcccaggcagacttcgccgctgtaaaagacagcggactggcccggcgtaacggcggcaaccggctcgtcaaaaatgacctcgatacgatcgtcattcagcgcgttaatcgtgcacggaatatcggtctggcggtagcgggtttttaccgtacagcgcagggtgccggtgaacggttcgcgatcgacccaatgtagctgctgggcgatgaggcctaccgacatcaggcgtgggtgctcatgcccctgggcgacaattaacacattgttttcaacgtctttatccaccacataccaggggtcttcgctaccgtctttggtgccgccgattcccagccctttacgctgaccgagcgtatgatacatcagaccctgatgctcgccgatttcatcgccgtcaacggtaatgattttccccggctgcgcaggcagatagcgccctaaaaagtcgcggaatttgcgctcgccgataaagcagataccggtagaatcttttttctttgcggttaccagccccagatcttcggcgattttacgcacctgcggtttttccagctcgccaaccgggaacagactttgcgcaatctgctcatggccaagcgtatagaggaagtagctctgatctttgttaccgtcgagcccgcgcaacaaccggcttttgccgtttacatccgcgcgacggacgtagtgaccggtggcgatatagtcggcgcctaaatcttctgcggcaaattcaaggaaggctttaaatttgatctctttattgcacagaatatccggattcggcgtacggcccgctttgtactcttcaaggaacagttcaaagacgttatcccaatattctgcggcaaaattaacggtatgcagttcaatgccaagcttgtcgcacacggcctgcgcgtcagccagatcggctgccgcggtacagtattcctcaccatcgtcctcttcccagttcttcatgaacaggccttctacctgataaccctgttgttgcaacagccaggcggaaacggaggaatcgacaccgccggacatgccgacgatcactttttttgggctttctgacattggaatactcgcgacattgaacttcaaggcggcgtattctatcacgcagccctttacttgacaccctctgtaaacggccagttaaattcgcccactatagataaggggtaacgttgtcccgtttgataactgcgaacgctttcagccaccagcggagaacgtaaattcggcgcgttcagaatctcgtcggcgctcacccaacggcagcaatcgatgtcattgtcatgggggtcggtcgcgcaaatatgatcaagcttgatagcgaataaaaagcgcaggaacggggttttatccggcgcaatccactgatgcatacggataaaatactgtggttgcgccgtgatgccagtctcttcccacagttcacgcgcggcggcctgcgccagcgtttcatctgcctccaggtgtccggcaggttgattccataacgatttaccgttgatggtctcttctaccaccagaaatttatcttcggcatgtacgatgcaggcaacggtcacgtgcggcttgaacataggcatccttattaaagcggtttatcaatgtggtcatagatcacgtcaagctgtttcagacgctcgttataagcttttgtcaggcaggtgacgtcggccttgcactgctgacgctgtttaagccagctctgctgggcgtcctgcagggcgccgcgactgcccatcgcgaacaaccctttcagaaactgatatttggtgtgcatttccacgtctttatcattcagcgtcaggtgcgcgcagatagccttttcatccgcagcctgcgctttctggcagtcgaagctggccgcattaacggataacggtgttaataaagcaaaagcaatgagaagccgtttcatctgtctttctcctgtgcgatctcgcgccactgtccattatcgaggccgttgagcgtgtagtcgcccatgctgtaacgaattaatcgtagagtgggatgaccgacatgcgctgtcatgcgtcttacctggcggttgcggccttcatataaggtgacttttagccaactggtgggaatattcttccgttcgcgaatcggcggggtgcgcggccacagccagtcaggctccgcgacaatctcaataccggcgggcagggtagggccatcgttgagcgtgacgccagtacgaagcgcctgcagcgctgcattatccggtataccttctacctgaacatagtaaatcttgccggtgcgtttgcccggttgcgtgaggcgcgcctgcagcgcgccgtcattagtcagcaccaaaagcccttcgctgtcgcggtccaggcggcctgcggcataaacgccttgcacaggaataaaatcttttaacgtgcggcgacctgcttcatccgtgaactgcggcaacacatcgtaaggtttattgaacaaaaccacgcgttttggctggttttctttccgtgatttagatgcttgtcgtgagctgaatcgcttaacgtagtgatttctaaaagaagttttttgcatggtgttttcagaacttattaattgccgcattatagcgcaataatgagtgtctttcatggcggcaaacaatagggtagtattgacatgctcattacaaaacattaacaaaaaattgctctaacgcagtcgtgcagcaggacgccattgcacatgcagcgcgatgacagacgagcaaaccagaagcgctcgaaggagaggtgaatggaaagcaaagtagttgttccggtggaaggtaagaagatcaccctgcaaaacggcaaactcaacgttcctgagaatccgattatcccgtttattgaaggcgatggtatcggtgttgatgtcactccagccatgcttaaagtagtcgatgccgccgtcgagaaagcctataaaggcgagcgtaaaatttcctggatggaaatttacaccggagaaaaatccacacaggtttacggccaggatgtctggcttcccgctgaaacccttgatttaattcgtgactaccgcgtagcgattaaaggtccattgaccacgccggttggcggcggtatccgctctctgaacgttgccctgcgtcaggagcttgacctgtacgtttgtctgcgtcccgttcgttactatcagggcacgccaagtccggtgaaacatccggagctgaccgatatggtcatcttccgtgaaaactctgaagacatctacgccggaattgaatggaaagctgactctgcagacgctgagaaagtgatcaagttcctgcgcgaagagatgggcgtgaagaaaattcgcttcccggagcactgcggtatcggtatcaaaccgtgttctgaagaaggcactaaacgtctggttcgcgcggcgattgaatacgctattaccaacgatcgcgattccgtcacgctggtacataaaggcaatatcatgaagttcaccgaaggcgcgtttaaagactggggctaccagttggcgcgcgacgagttcggcggtgagcttattgacggcggtccgtggctgaaaattaagaacccgaacacgggtaaagagatcgtggttaaagacgttatcgccgatgcgttcctgcaacaaatcctgttgcgtccggcggaatacgacgttatcgcctgtatgaacctgaacggtgactatatttccgatgccctggcggctcaggttggcggtatcggtattgcaccgggtgcgaatatcggcgacgaatgcgcgttgtttgaagcgactcacgggactgcgccgaaatatgcgggccaggataaagtcaacccaggctccattattctgtctgcggagatgatgctgcgccacatgcagtggttcgaagccgcagacctgattgttaaaggtatggaaggcgcgattgccgcgaagaccgtgacctatgacttcgaacgtctgatggacggcgctaagctgctgaaatgttcagagtttggtgacgcgatcatcgaaaacatgtaatccagtttttgggttaaacaagaacgggagccgaaggttcccgtttttattaccttcttaaagttcttccccaaaactttccccaaaacgtttccccaaaacccttatgatttcaccctgtttttgtgttgacgatcacccaatcttttcctctgtcatcattatatttgtctgtcatttttcttgatttatggccgagtaatttttgcgtgtcgacaccttgttctctgtacaagcgttctgataatgatctctgttcgtgaaaagtgggtggggatcccttatcccatttcagtccacttctgtcacgtgcttttttgaatgttgaagttaaagaactggttgaaacctgatcaccgcggtttgcttgtgaggtggtatgtctgaaatgcacaagatatttactgatgactgcatcccggcatttagatacaacgtcccgaagagttaaacccagggcttcacatttcaagtccaatggtatggctaaacgcgatcctgttttttcctgttcgacatggagcatatcgtcccatatgtctttaaacttcatgttacagatatcgcccaaacgctgacctgttattatcgcgagcaacattccacactggaggtatggttcttgcttttcggcagcttcataaatagttttccactcttccagagaaagacgctgacgagtgactctgtttctcggctgcttggtcgccagggcagggttatagcctggagggacatgaccgttatgttgcgcttctttgaatacatcaatcaaaaccatgcgaacaacttgcgccatacgattatggccttcagccttaactgcatccgtgatctcagagatatccaatgcggaaatatctttcaaatattgcataccgcaatgttcgcgaaataacctgactggttttgctttctgtcgataagaattaggtctgagttcacggtgttttaaccgttcgtcctgaatttcaatatacttatcaatccactcagtgacagtaatgtccgttcttctgcctttcattctggcaagacggtcgttaacactaagaacctgcctggttctttgttctgcaatgatcgtgttcgcttcggatgcaacctttttagcttccacttcatcagtacccaagctgtgaaagcgtccggaaacaggatgtttatattgccaataaatcttgcccgtccgcttatctagcttgcagtatagattcggaattgaaattttgtgagaacgtggtctagcagccatctgcaataatccgttgtaatcttggactggcgtttgccggaattttcggttcggcaagcgtaccaacaaatcgagcattacggtctaccatccagtaacgacctacttttacagctggaggtatcatcattttgcctttagcgtatttcttaaggatacgctcacttggtgcttgcgctccgaactcttcattggcccagtcgagtaaggggatcattcgtgacatttatttttctccacaaagcccggctgcacccgggctataacatcaaatatcagtgctggtggtcggtattaatatcaaccagataaacacccggaattaccggagagttgccagcctgccccattattttctcgtattcggaaatctgatgatctactggttgtgacaggtcgcgatatttactctgaagcagggcgacgcggctttctgtccatgccttccacatatgccgcgtgtagctgtcagcgtagttttcgccatgaagaaacttacccattgcgaaatcatattcttgccgctcgcgcccccacttcttaagcatccacgcctcaaattcagcgcggccatcatccggcactaccggcactggctgggcgctgtactcatgtgccacagccatttgtgggtgattgggattattacacggtactccacacacctcacagacagcgtgctgtatcccgtccagcctgcggcgttcctgtagctctcgcatcgccgctgcaatatcggtgtagtcagtcaaaactgaatcgtcgcagatttcagcgcgcgccagaatttcagctattttcctgtctgttagtttgttattgctcatcgcaatacatcctccacactgattaaccctttacggctcaaatagttcattgcggcgccgtgtaacttgctgttcggcctggcgtttctaagcgagtgggccagacgcttaatccacatcgttaattcttccacttgcttttctgcttcttccagttgttcgcgcacctgtcgcatatcatcacgctgagtaagtgccgattcaggcatggaatgttcggcacacgggattattgtgtgaacgtctgagtattcgccgccgccgtcactgaatgccattacacaaccacactttgatttgccgttcacaaagacaattttgttactcataatgaccgtcctgcacgttgcgtaaccagatacagaccgcgccgtcttcggtgtcgtgaatggaaccgacaaaccagccgttacctgctggcggatctggttgccacgttgaaatgtcgcacccgtcaacgtcaggatctatttcctcgtcatccaggtatgagactttccattccaaaccgttagcttccagccaggcatttaactcgtctggagagataacctcacgaccatcgcaaaactgttcgtacagcgggtgagtccagtaaccgtaattatcgcgctctacgggtaatgcagtgattttgttcattatcatttcaggcggtcagcgaccgccagcctccgttatgcggtcacgttctcttccacgccagcgttttcgacgacgctgtactcacctgtgatgacagacgcatcagccggatcgatagtcagcgtctccttttcgtccattgataccgcgcgctggatctcaatggatacaggcaggtatttgaacaggcggcgtatggcggttttttttgccatttcctcccagtgagtaacccacgggccgttgttaccggctttgctctgtgcccgtaccagctctatctgtttacgggtcattacctcaaactgtgtgccaccatctttaaggcgggcaacggcatagacatgagtaactggtgcatcttcgttctcacccggacggtgtaccagcttctcttccagaccaaactcgaagctgaaatcgtcaccttcgcggacgatgcgcgcggaaagacttgcaatctgtccggaacggcgggcaaggtcgatcattccccggtagccaataattaactgaacgtttttttttcctgacttttcgtttttgtttccgaacggcagcagataggcatgaccgagcgcgccgccgggctccagcccaagctgggaacactgaacgatggcgctgacaaaactcatggtgtcacagtcacccagcgccggaacttttcggatttccgttgtggctatccggatcatgcgttccgctgtcatgtggcggggcagggccgccgccagctgttctttcatggaaggctggttgataaagctgatcacatcgttgttatttttcactgccgtcggggtgcgtgctccctgtgttttttgcaggtcggcttttgcaataggtggctgtttaggcatttgcattctccttcgcccagcggggcagtgataaagttttaatggcaggccattcatcgttattaaggcattcggccagggtttgcagattgcgacgatattcccgctgacctgccagttttgcgtcttcacccatcatgaaaatctcaaccgggtaacgcccacattcggcggttgtactggcaacaaggaagacgaaggtgggtctctcaccgaactgcgcccgataaccgtcgctgtagaaagcgtcctgtacgtggtagcgataatcgtaataagctgtcctgaaccgctggatatcagcagtggttttcacatccatgatccagtgaaattcagggatgattttgtccggacggcaccgacataaaattcctgtttccggatcttcccagtagactgatgattcagcatatccggcgctttcaaccagccactgccccagcggtaacaccatcacactctggtacataagttcgattttccggccttcttctgccgtaagcacggttcttcctgtccgggcgcattcctccagaaaggttttctcttcttcttttcctgcactggtacggcggttaaactccggtgcgatgatgaagcgtttgctgaattcctctggttccagtacccggcagtgaaaagccgttcctgtatcgagagattttgttttctccgtgtccacgggggcatttttgcgccaaagataaattgctggtgtatctgcgatatcatcaagctgtgatttactgacccccgggccagcgtgatacgcctcgttagggatgtcatagtaaatgcctggctgtatatcatcaggtacagtgatatttccgttttctatggaatctgccgcttcgccagcttcatcaccgccagtacctgatccaccgtctgctgtaatttcctgcactgcatcgccagccgtttcctgctggttgctctctttcggcgtttttccatctctttctgttctggcttccgttttttcggtctggtttgaggggggcgggaatagcgctgaaacgtcgaaagtcccgtctgcgtttctggtgacagcctccggctctgctgctggttgtttttcctccggcaccacttcttctttttcaccctgatttgaggcgctgtaattgttatgaacccacttcggatcgttcgggtcactgatgccttcgacatattcaccgcgcgcggctgccagttgtttaccaacatcaaccgggtttttgggtggaatgtttttacgtgcttcgtgcagttctgcgcgtattttctggtagcctgcttctgtctggcttacaggtggctcattctccagcggctgcgggtccggatgatgttcagttgtgtcctgttccactgtttcaggcgttgctggttcatctgccagttcgtctgtcggttgcggtttttcttcatcacactgaaatctccctgactcaatatcccgcagacatttgcccgcctgacgaagtcttgctgcattttcttcatgggttgttggggtgttatcaggcacatattcgtaccagtccggatcgcgaacaccatgaacggcaagaaagctttcgcaccacgtccggcgaagatcaggattaccgttatgtacggcctttggcgctttgcgtaccaggtcaataatggtctgtcggtcgtagcctttgatgtcgggaatagtgcccactgtcatcgacattcgcttccagtcttcccggtcttcggcgatgatacgttttgcaaaatccattgcaggacgcaggttattcagaaccagctcctcacagaaaccacaggcgagctcatagttaatcgttctgtgtgtcggtttttcgctacggcgtggacgttctggcttatttacgtcgtcgacaattactttatgttgcccggtttttttaacgggtacaggtttattcttcaggcgttcagcccattccttaaccagcaggccgcggttaatgtgttcagcactgaaccattccttaaaaaacttaatagtggtgcataactcaggtacttttccatcgacaggaaatacctgtttatacgcattcactgctttgtgaatatcgtgctcgatagcttttttgaacggctctacattttctgctgcgagtatcaggttctgggcagtggtattctgagtatccatctccagacacgcgatttcttttttctggtctgtatcgacgtgataaagatactcaccttcacctatgtactgagcaagaacgcggtgacggagaggcatagttgcgacaacagtcagctcgggggctggggctgttgcctgggcagggctgttgctttcgttaccaaaattttcggtgtggtcttccagcacttcgcctgtttcggtatcaacaccatcgacgatatgctggcgcgccgcggcggcggcttcagatgatggcagggtgatcgccggggatttgttcccaagtcatgccatcttcaccgaggcgataataattagtgaaggtaaaacttatttcaccttccggcggcagctcgttgactaccggaaaattggtgcggatcggccttgcataatccttaccgcggccggtttcaatttcagcatcttccagaacgacatccagcataaggttggcgcgcgcttctgattttgcagtgaaccagaccgtcgcatcttgctttccggatttctgcgtagcttttactacatagaaaaattccatgtgagatcctcttttttagatgtaagatccccgggccagagatagcgcccattgggtgaactttggttttttgtgtagttttccggtggaactttggtcggtgtcaccggacgtatgggccgccttgcgcggcttttacgttaactttcgtgcgccatctggtcgtatgaggcacaacgtacagagcagtaatcgcgctcttcatgtgtcagctgcgcgccgcgaatcagcgtcagctcgttttttacttctttgccttgctcaatcgtctttccacacaggtggtaagcgcatgtcttttggttatgcatccggatctcctttctgcgccagcaggtagcagaggcggcggattaaaacctcaatccggttaagcaggacggcctgctgtcgagctggtttacgtgcgaaatcaatcatcctcaccctcgtttgccttatcgccggccagcggaacgtttatcaccttctgcgcgttaacttttccacctcattccggtcttcgtatgccccggacggctacattcgtgggcgtcctgcctgggtggttcgttgttgctatggaataagtaaagcatcattttacttttcagtcaacctttgcggaattaaagtgtaaagcaaagctgtacaataagcgtgttcatttttgaactatgtttagcagctcaatatgtatatgattaaaaaaacatcagtaaggggtggttatggatcgtgacgagctggaagaagaccgtgcagcattcattgcgggtgagattggcggcgcagtggtcgaattgataatcgacggcgtagtgatcagccgcgatgcgattgtagatagtctggaggctaagcgcagagcagtgggaaacgtcattcacaagggtgtattgcgggatgcggccgctatggtaagaaaagggcaataaaaaacccggcacagtggccgggttaaattattgttgccgtgtaagtaaagccgctattgcatttccactgtattttgaatattcaatcctgaattagttatccaaaattataaacatttaacaactgtagatacgtcagattctagcgcttcaatctgagctttgttggcttgagtagccataccatagatggtatagcttttgtgctgtagtttacttaacggacacccttcatggttaataatagctgcaagcgtgttgccatccttcacattttgaactctttcagaaagatttccgctagtgaatagatgagggtgagttttcaagagatcatcggtgattcgtttgatctcttctgcatgtgatttaaatgccttagctgcatcactttcgttagtacgggaacgattctgtacaaaaagatgtaacttagggagctcaataaggttttggatagcttctttattgaaatcaaggaacatctcgtcttgttctgacttgtctattgatacaccgtaaatgagcttaacaaggttttttatgccccgaattgatgcagcatctgctgtgcaaggaatgattattctgtttgcggcgaccacacctaactcagtgtagcttgcgaagcttgggttgcagtcaataaagaaagtttttgccctgtcagaaatactcttatcggcttcgagtgatgcgattaagtccactaacaaagaacgacttttcttccatgcttctttaactggtgatgagccaatgtgagatatcagacgagaacaaatatcaagatcgacatcacctggaaggatgtataaattctcaggcatcttcgagttaacagtatgtgctcgaacgaagtaagaggattcatttcctaaacgagataacggagatttactgaatcgttctttgatatagccagctatagtcacattcctatcacgaaggtagtttaggttttcttcaccagtaccattgcctccaaggataatttcagaaacgtttgattgcggacaagcgtcgataaccacaacatcttggtctggatgggaaattgcgaactccactgcaaggttgtacgtcaggaaagtttttcccacgccccctttgttgttccaaactaggtattttgtattgctggcaatcatttctgttggcctatcagtagcttcaacacgtccattatccattatcgtatcctgtgtgtatttgtctatgattcagttataaaaaataacattatgaaaatgcccgtctaggcacttgatgaaggctggtaaccggaccgggaaaagagcgaaataaaatctaatttatattaactctttattttaaaagtgattatgcgccttcaccttttatcctgcggctcatgtacttcgcgtacaactcgtccagctctttcagcctcagagagaaaactctcatcatgttctgctgctcttcctcgggcaactggcgatagagctcaagcaggcgctgttcgtcaggtttaagtccgtctttctctccgacatcctcaccaagcagccacggaactgatacgccagcagcatcagcgatagctaatgcggagcttttactaattcttcctgttttgaaccaactggaaactgcttgcttgctgacaccagctaccctggccatctctgttttagagaaacccttcttatttaactctgccagcctggagatcaggccattcgtcagtgtgttatcgctcatcacctcattgtaaatgattgctttacttgtaggtaggcatgtgttgtttgacttgttggtaaaatgatgctttacttttgtcatctaaggaggtcctatgactggtattgaaaaagcaattcaaaaatttggaacaggggctgctcttggaagagcgcttggattttcaaaaatgacaatttccaactggaaaaagaccgggattccccccgatcacattcgttcagttttcgaacttacaggtgttacgccacatgagttacggcctgacttgtatccaaatccaacagatgcattaccaagccaagaggcgtcagccaaataaccatagaggatatttacccatggagaacgcaattgcacgaaagttagacccaccagaaatcaacccgattgagatagagagtgtcctgctcaaccggcttgcatcggtaggtcagaaatcatacgccgagcatatgggcatcagcgagtcgacagtcagcaggcgtaaagctgaggggtatttctgcaacatggcgaaagagctggcttttcttgggattcaggccgcgccaccggaagcggtactggtatccagaaactatctcacagctgtagagattctcgctgatgccgggctaaaggctgaacgagccaggccggatgcgctggggtgggactgaaaatggcagcaactaaaaaggcgaaagccgcggtgctcgaacaccaacggctttctggtggaattaactggatcaattcacaggagtaattatggcaaacactgccaaagtaatcaattttcctgtgcctgacgtggcacctaaggagccgcgcgtggcagatctcgatgatggctatacgcgcctggcaaatgaacttctggatgccgtgatgtgttctggtttgccggagactgagctgtgcatcctgatggccgtatggcgcaaaacgtatggatacaacaagaaaatggactggatcagcaacgagcagctagaggagatgattcagaagcatcatacccattgctcgacagcaaaaaacagtctgatcaggaagaaggtactgattcaggaaggccgcagggttggtatgaatatccatatttccgagtggcaaactaaaaataacggattctgcaaaacattagctaaacctgctaagaaaaccttagcggaagttgctaacgcacctaagcagaagttgctaaccacaaaagacaaactaacaaaagacaatattaaaagatctacgtccgagaattctgacgaatcctctgacaagccagcaaagaaacctcatgttctaaaacccgaagcagcgattcagagaggcaacaagtggggaactgctgaagacctaactgctgccgagtggatgtttgacctgataaaaaccatttctccatcagccagaaaacctaacctggcaggatgggctaacgatatacgcctgatgcgtgaatgtgacggacggacacatcgcgacatgtgcgtgctgtttcgctgggcgtgccatgacagcttctgggctggcaacgtcattagcccggcaaagctccgcgaaaagtggactcaactcgatatcaaccgcaacaagcaacagactggcacaactgcctctaagccaaaacttgacctgaataacactgactggatttacggagtggagctatgaaaaacattgctgcgcagatggttaattttgaccgtgagcagatgcgccgtattgccaacaacatgccggaacagcatgacgataaaccgcaagttgagcaggttgctaaggtcatcaacaacgtgttcagtcagcttatggccgcgttccctgctaccacggctaatcgcagccaggccgagatgaacgaaatccggcgccagtgggttctggctttccgtgagaatggcattaccaccatggaacaagtagctgccggaatgcgtgtcgcccgccgtcaggaacgtccgtttctgccatcgccgggacagtttgtagcgtggtgccgtgaggggagtggagcgctcggggtcagtgttgacgacatcatgggcgaatactggcgttggcggaagcttgttttccgttatccgaccagtgagcagttcccctggagagataaaaatccgctgtattaccacgtctgcctggagctgcgccgccggggaatggaagggcaactcagtgaaaaagaacttatccgggccgctggcgacattctgcatgagtgggaaaagcgagttcttgcaggtaaacccataccgcctgttcgtcgcgctttagccgcgccgtcacgggatcgcggtccaacgccagccgagatgttaatggcgaaatacaaacaacgcaaagacgccggtctgatttaacaggagtccgcccaatgagcaacatcgacaaacaggcgctgcgtgaagcggctgtagcaatagagacagtagcaacgccgcagaaattgcttgcgtttcgtgtgaaggttacaccgcaggttgtgctggcgctgctggatgagaatcttcagctccaacgggaaaaagacgcaatagaggccgtggcacttgcgctgcgtgatgatatgcgacaggcgcgggagcaactggaagctgcagagaagcgtattgctgaacagcgtgagtattacgagggcgttattgctgatgggagtaagcgcatagcagaactcgaacgcagcgagactcagcttatcagcgaacgcgatgacgcggaatccgccctgaacgatgcctacaaagccgttatgggccaggcaccagaatggagcaactggtttagcttcgagaatgcgatagatgaaattgagttggcgtgcgagctatggcgcaaccagacagatgacgttatccagttccgccagcgcatagtagaactggaggcgaagcttgaaactgccgacaggttgcaggatggcgcattccgtgacggcctgaaagctgggttcagctatgggcagacagatgaccaatccgggttcgcgcaatgcatgtctgcatatagcacacgcactgacattggtgtgaaggtggaatgagatggcagaaaccattttagacgtgtgctgcggctctcgcatgttctggttcaacaaacaggattcccgcgccgtgttcgccgatatccgcgccgaagaacacacattgtgcgacggtcgccgtctggttatcagtcctgacctcattgctgattttcgcgcgctaccgtttgctgattcgtcgtttccggttgtggtgtttgacccgccgcatctggaacgtgtcggacaaactgcctggatgggtaaaaaatacgggcgattgaacaaaaaaacatggcgttctgacctgcgagccgggttcaaagaggcgttccgtgtattgcggccacacggtgtactcattttcaaatggaacgaaacgcagattccggttagccaaattctggcgctgacggacgtaaaaccaattattggccagcgaaccgggaagaacgacaaaacccactggattatttttgtgaaggattaaccatgaccactattaccaaagaatggctacagcaaaccatcgctgaatttgaaaacactcgcgacgatattccgtttggcctcgacgatgacgacgccaaaattcttattgtgctgaagcgtgcgcttgcatcgctggaacgcgaacgtattcgccgcgagcacgccgagtggtcagataagacgttcggcgatgtcggtccagtaggaccactgaagcacctctcgaaagaagcattagaggccgctgccgacccatccgatccgcttgaatgggctgatatgcagtttttattgtgggatgctcaaaggcgtatgggtatttctgacgaattcattaccagggcgatgatagaaaagctggagataaataagtctcgccagtggcctgagccgaaagacggcgagccacgactgcatattaaagagcagtcagcgccggtaattccggatggttggataagctgtagtgagcggatgccggatgaaatcgggcgctattggtgctatgtcgaagaacaaaatgacctcgggaaaagccattaccagtggaactgctcatggaatggcgataaatggggcggtgaaatgatgtctggaaaagtaacccactggatgccgctaccagaaccgccgcaggagtttaaccgtggctaacctgcaacttgccgtcaaaggtgaatacttcgatgccatgattcgcggagagaaaacggaagagtatcgcctgtgtaatgactactggaataagcgaattatgttcagggagtatgaccgcctgattatcacaaagggatatccgaagcgcgacgattccagccgtagaattgacgtcccgtatggtggctatgaagtgaaaacaataacgcatccgcactttggtgatgaaccggtaaaggtgtacgcgataaaggtgaatatcaattgctaaattagtagcatagcataaagatgcttgcattaatgaagtgtgaataataacgcttcatcaatagtaagctactgaaatggcaaaaacaccatattaaagaggattcaaaaattgaaaatgttcatgcaaatagacagacgcatagatgttaatggtaattcatacttagttagatgcgaagagaggcctaacggtgagtggcgtgtatatgatattgaccgtaaggtcaatatcagcaccatgaacaaagacactgcctttgatgaatggaaagctgaagctaaaaaacaacataattcgtagaattacaaaaaccccaaaccatagttgttaagtattatagatccatccttgtcaggccaaagatatcgcaacttaaaaaaatcccatcaattcaacccacccattgctggggattcctcggtaacgggcgggttttaccgcctaaaatctgatatgaaacaacatgctagcttttgcaaaaagtgctattcaccccttgaatattctttctaacaggtatactgtgtttatatacagtggttgaatgtagagggaattatgagaattgaacttgttatcagccggacaaaacagcttccggaaggtgccgttcctgcacttgaaaaagaattaattacccgtctccagaatcagtatgaaaactgcaacttaaccatccgtcgaggcagtcaggatggtctgagtatcgtcggtgctgctgatggcgataaaaaacgtatacagagcattctgcaggaaacgtgggaaagcgctgacgactggttttattaacattgcgcttaatgctggcgcgcatttttcagaataccgcaatttgcgtatccctttgatgctgctgccgacaatttttaaccgcgtctgtacatcgcctgaagggagaacaaaaattgagtaattcagctttgcaaaaatcagaagatagctggtatgacattgtaagaagatctgatggctgcgtagtgtttagctttccatcatcaggcaggcatcttatctatcgtgtaaatggcatggtatctatgcgtcctttgctggatgatgaagaagtttttactcccaacggttttatgcattttattcgccgtctcggctaccgggtaacaccaccttctgataatatgaaatcaacggcctgaacaaccgttaaccttctgcgccacggagaataccatggcgcacgaattacaactcatcaagcagtcatctggaattctgatccccgcaacgccggagagtggggatttcctgcgctcagtaaaaatcggtgagtggatacacgccgattttaagcgtgtccgcaactacgcctttcataaacgcttttttaaactccttcagcttggtttcgactactggacgccaactggcggcacggtcacatcgcgggaacagaaacttatctccggattcgttaattttctttgcggctccgcaggccaggaatataccccggcccttaacgaggcggcggaacagtacctccataacgtagctaccctgcgaaccggggacgtcgcccttcttaaatcttttgatgccttccgggaatgggtaaccgttcaggccgggttttataccgagcatttttatccggatggcagccgcgggcgccgggcgaaatccatagcgttcgccagtatggacgaaaccgagtttcaacaggtctataaggctgtgctgaacgtcctgtggaactggattctgtttcgtaaattttcctctccggaagaagttgaaaacgtggccgcgcatctgctggagttcgcatgaaaatgacatggtttcagcatccggcgtgtaccaccgaagaggcggatgagctggtgaagcagtaccgacgcaggggggtaaagacggagcgtagtctgaatcatgactgcattcactggacggtaagcgccctgttaccggagttcgatcatgtgccagaacggaggcgtaaatgctcttatctgaaataaaaacttaccgcagtaaaaaatggctggcagccgtcgggcagattgaacagtgcgtgttgtgcgggcggtggggaacgcaggttgcacatcgcaatgaattaaagggcatgggaatgaaaacggatgactgcgccacggcggctatttgtcaggaatgccatcatgaaatcgataacggcagtcacctgagcagggaagagcgccggtgtctgatgaacagggcgatcgtactgacagtgattaaacttgtacgaatgggaaaggtggtaccgaaatgatttatccagccagtaccggaaaaccgggcgaatattttcgactgaatacactggaaagcgtgtggattcagggaaaactccgtatgtggggacgatggtcatacatcggcagcggtaaacccggcaatatgtttaaccagttgctggcctccagaaaactgacaaaaacagccatcaatgaggctttacgccgtctgaaaaaatcaggaacaagcaagccagagctggaggcctttcttcgggaaatgatgaacgggaaacaaaaaagctggctggcgcattgtactgattccgaagcaatgttgattgaccgcgtcattggtactgtattagctgagtatccggcgctgaaaaagttgattcaccagcgttacgaagggtgtggagtgagtcagagaaggatggctgagttactaaacgaacaatatccagactggtgttatgcaacgtgccgcaatcgcataggtgtatggctaaaaatggcggaatttatgctttatctgccgatgcgtgaagcgtttgcaaccgatgcccacaaaattgcccgttgactctgtttgttatccggggctatattcccgccacgccagcaaaatctggcgtcgggattggtctcccggattactactcaacgcataccgcgttaagcggttttttttatgcgctaagcacggctacattcgcgatttatggtgggctgtgtgagggcttcttaggaagcgccgggtttgagtagccggtaagaccaaccttgcacagttcaccacccgtcgattggtctcggcagtggtgatggttaacctcatgaggtgatactatgactactcaaattaatgcagataacctttcccctattactcataaccagatccctgtcataaccactgaactgttagcgcagctttatggaactgaaacaaacaatattaaagtaaatttcagtcgaaattcagatcgttttgtctgcgggaaacattacttcaagattgaaggagatgaacttcgcgctatgaagcacgaggttactcacagtaactctgtgaaaattgcccgcaacgttcgatctctcatcctctggacagaacgcggagcagctcgccacgcaaaaatgctcgaaaccgatcaggcatgggaggtattcgagaagctggaggattgctacttcagccaaaagaatccttcagtgcgagtttcacgccagaaaagttacgacacgcgagttctctgttatcagcaaagcggcgtcactgtttccacaatcccgttgcgggatgatgacattgtcatttcccttgagtcatggctggaactggcgagagccaacggttggtttgttattcgcaaagatcaactggtggaaaaactgatgcagctttagcaaaaaagttattgcatttttagccacaaactgcttcaattccggtatgcttcgcaaagctgtatcgcgaggcgaataacagacatgaacacaaaaagaacccgccattgagcgggtttttgcgttttaggggttcgcattcgcgggccttttttgttcaacaggctttgaattgtggtttcttgcaccgtggtattttctgcttcgccctatactatttgcttagtcttgcggaggtgtgaatgaaagaagggtattactggattcagcataacggtgttgttcaggtggcatactatacgaacgacacagttgatgatctggaatcaggacggcttattgtcggtgtctggcatctgacaaggggcgatgatatctgccataacggtgaagcagaagtactgtcggggccgttacaaccaccagcttagatataaacgcgctggcggcgcttggaagacggcttgaaatattagctgcgtaaatcatatccctgattgtctgtataccactgccgcatagcggggatcggctcccgcattctttcacataaaagagccctgctgcggtttaaggagatgatgatgaaaattggtaagcacgcacataatgtaaatacttcgtctgcattggctcccagaacaagatttgtcttttcaacttctggggtaaataaagaggaagtcattgaaaagttaaaggtcgtcattgaaaaaattagcaacgaggaggtatctcttgatcctcatattcatctggagtcctacatatcaggcgtgaacatatcctgctctcccgcctgattagaggcgtgctattcttctaccatgctgccaacttgaattggaagagggacgatatactcccagaatggattcatggaagatattccagaccagtaccatattgctttcgtgaaaaccattgcggcattatctgatgatgcgttcaggtcaagtaaccgcatatcgccatgatgaacattggtatcctcattgataagaatttcataaattggttgcggaccttcctgttctcggtatttctttctaaaagaatctgcgtcttctattgatttacaagcgaatattgactggtatcgtgatggcttctcaggaaattgcatctggcgtaccagttcaacaataagctccataaggtcatcaccattaagttccctccttgggaaaagatatcgcagcccatgctcggagattttgaagttaaatttcgcgccaataaagctatcaatggcgtaggtgtcagttacaggtggctgcatggaagaaaaatccattaatgcatttgcgttgtaccggcctcttctgtcggcggaataaagcactatgctcatttaattctccatatttggtgtggttacttttggcgatttaacaatatcaaatgcagggtatacaccgccagacgtcatctggcacttattcacaggctgcgctattgcgtggccttttttatttccacttacccgacatccgggtagtccatttcccggacaggggaagttatgacaatggataaacatacaacatggctggcctacatctgggcattaatcagcggcatatgcgcccagtggacgttaaacgactatggcgcgctgataggtattgttctgggtattggtacgtttctggttaataagcattacaaaaaaaaatcagagcaggctcaggcaaggcaggctgccgcgatggaagaacgtaacaggctaatcgcccggattctggaaaaaaacgaccatgacagcatgttaaaaatgctggcggtatctgaaatgccggagggcaatgatggcgttaaggacaaaagttaaatacggtctttccgccgctatgctggcactgattgccgccggtgccagcgcaccgcagctactcgaccagtttttacaggagcgggaaggaaatatgctggtggccgttcgtgataacggcggcgtctggtcagtatgccgtggcgtgacccgtatcgatggtaaacccgttgtgaaaggtcagcgactgacacaaagccagtgcgaccattacaacgccatcgagcgggataaagcgctggcgtgggtcaataaaaatatccatgttccactgaccgggccgcagaaagtggggatcgccagtttctgcccgtacaacattgggccgggtaaatgtctgccctccacgttctacagaaagctgaacgcaggagatcgtaagggagcgtgtgcagaaatccgccgttgggtatatgacggcggcaaagactgccacaacagggaaaatcagtgttacggccaggtgatacgacgcgaccaggaatcggcgctggcgtgctggggtattgaacaataaattgttgtcagcggaataattcaccaaaaaatgacatggcgccacaggggcggataacacaaaatctgccgatttctgatttacgaaggatataaaagcgaaaaccccgattgctgcaaacagtcggggttttctgtttctgcaccttgatgaaggcaagggagaacctgtgattgatattagcaaactgattagggagttgcgactaatgattgagcaattaccaaactggaaatttatcctgatctggctggtactgtttgtcgctgctattggctatcttgtagggcaaatccgttggtggtgacatgaaccgcataactactggcgtaatagtctcattgcttatattggccgccgcgctgggctggactaccagtcactatcacggtaacgccgtgaagtacaaagaccagcgtgataccgttactcacaacctgaagatggctaacgagactatcagcgatatgcaaacgcgccagcgtgacgttgccgccctcgatgcaaaatacacaaaggaactagctgatgcacaaaacaggaatactgatttgcagcgccgccttgctgctggtagccgggtgcgtgtcgaaggaagctgtacagtgccaaccacaaccaaaaccgccagtacccgccgcgtgggcaatgctgccaccgtcgaactctctccagttgctggacaaaacgttctcgatatccgcgccggaatcatcagcgatcaggaaaaactgaagtatttgcaggagtacatccggacgcagtgcaaataaaaaattcccgcaggacggttacggttccggcctgcagggtgtcataaagagcacaaaatgtcttataaggggatatacggacatatgtcgcatactatggtactgaagaaaaagacctcatgtatcaacgcagcgtaaccagacgctaaaaactggtacacctcatgaaataacccagtggctgaaaagcttggtgttggagcgaatcccctgaccaggctggcatttattttatctgaatattgacgctgtattttttcgctttgtttttacgggcttcattacgtgtctgaagtactctcagttcgtattttccggacgccggtagcgtgtactggccattgtcatccagttcagatgaatatctggacaggtcaacggaatcgctaattcctggcccgaacaggtaggtatctgcgccttcattcgaaatacttacatgtactttctgcccctttctggcctggaagttatatgtatcgtaatcgtatccctttattacgccggaatagcgggcgctattttgtcctttatcgaattcgacattcacgtttttaccagtcgcaaagccagctgaggttagcagtgcaaaaagaaaaacagttttagcgatactcttgaatttcatatttaagaccctcagtcagcgttaaaatgattaattgttatattataacaataagtgttcggttttttccagggtcctttccgggaattctgcctgttacggggcggcagcgtcgcaggatttcactccttatgaaaattttcagagaaaagccagatccgttcttcttattgtttatttcctgtttttaaaggtttttttagaaaaaagaaaggatctgctggataacgtttttagttaaaaacgaagatcgcagatcctttcctgtttccgggagacttttccatgaacgtgaacaaaaaaaaactggctgaaatttttggttgtgacgtcagaactgtcacagcctggcaaagccaggggctgccacttgtttccggaggaggaaaaggtaacgaagcagtgttcgacaccgcggcagcgatttcatggtacgcggagcgtgatgcgtctattgaaaatgaaaagctgcgtaaagaggttgatgatttacgtgccgctgcggaatcagatcttaatcccggcaccatcgactatgagcgctaccgcctgacaaaagcccaggcggatgcgcaggaacttaaaaatgctgagcgcgaagggctggttcttgagaccgaactgttcacctacatcctgcaacgggtggctcaggaaatagcagggatactgtcaagggtaccgctggtattacagcgcaaatatcctgatctgtgccagtcgcacatcgatgtggtcagaacggaaatcgccagggcgtcaggcagggccgccacgatagcggatgtggagaagtggaccgatgatttccggagagcgcagggcgaataatgccaacagagccataactaacgggctgatagcgcttcatattcccgtaccgcttaccaccgtgcagtgggctgatgagtattactatctgccaaaagagtcctcctacacccccggcaaatgggaaacgctgccgtttcaggtagcgataatgaacgcgatggggtatgaactgatccgcgttgtaaacctcattaagtctgcccgcgtgggctataccaaaatgttgctgggggtggaaggctatttcatagagcacaagtcgcgcaacagcctgctgttccagccgaccgactcatccgctgaggattttatgaaatcccacgtggagccgactatcagggatgttcctgtattgctggagctggccccctggttcgggcgtaaacatcgtgataacacgcttaccctgaaacgcttttcttccggtgtcgggttctggtgcctcggcggtgcagcagccaaaaactaccgtgaaaaatcggtggatgtggtctgctatgacgaattgtcatcttttgagccggatgtcgagaaagaaggttcgccgacgctgctgggggataaacgtattgaaggttctgtctggcctaaatccattcggggctccacaccaaaagtcaaagggtcatgccagattgaaaaggcggcaaatgaatcggcgcattttatgcgttttcatgtaccgtgtccgcattgtggcgaagaacagtaccttaaattcggtgatggcagtacgccgttcggtctgaaatgggagaaaagcaagccggagacggtgtattacctttgtgaacataatggatgcgtgatccgtcaatcggaacttgatcagaaagcaggccgctggatttgcgataacacaggcatgtggacacgcgatggactggcttatttcagcgcgtccggtgaggaggttccgccgccacgatccattacctttcatatctggacggcttacagtccctttaccacctggatacagattatttatgactggctggatgcgctgaaagatccaaatggtgtgaaaacctttataaacaccacgttgggcgagccttatgaagaggcggtggccgaaaaactcagccatgagcttttgctggaaaaagtgattcattatgcggcgccggttccggagcgggtggtgtatctgaccgctggtatcgactcccagcgtaaccgttatgaaatgtatgtctggggctgggcgccgggcgaagaggctttccttattgataagcaaattatcatgggacggcatgatgatgaagataccctgcagcgtgtggatgccgtcattaataaaaaatatcgtcatgctgacgggacggatatttccatttcccgtatctgctgggatatcggcggtatcgatgcagaaatcgtctataaacgctcaaaaaaacacggcattttccgcgtgctgcctgtcaaaggggcctccgtttacggaaaacccgttattaccatgcctaaaaaacgcaaccagagcggggtattcctgtgcgaaatcggtactgatactgccaaagaaatgctttacgccagaatgggggcggttactgcgcctgccgacgaagccacgccttatgcgatccgctttccggataatccggatgtttttacggaggtggaagcgaagcaactggtagccgaagagctggtggagaaactggttaacggaaaattccggctgttatgggatgccaaaggacgtcgtaacgaagcgctggattgtcttgtctatgccagtgcagcgttacgggtgtctgtgcagcgctggcaactggatctggaggcgctggcgacatcaaggaaaagcgaagagcaggataccccgacacttgaacaactggccgcaatgctggcaggaggagttaatggcaacaatcactgagctacaggaagcccgcgtcgcgctgcatgacctgatgacgggaaaacgggtggcgacggttcagaaagacgggcgacgggttgaatttaccgcgacatcggtaggggatctgaaaaaatatgtcgcggaacttgaggcgtcactgtgcaatggtcgccgccgggcacctgtgggggtgagactgtgaagcgcaccccggttctggtggatgttcacggcacgccgctgcgggaaagtctgggatacaccggcggggggatcggtttcggcggacagatggctgactggatgcccccggcggaaagcgtggatgccgcgctgctgccttcgttgcgcctcggcaatgcgcgggctgatgatctggtccgtaataatggtattgcagcaaatgcggtggcgctgcacaaggatcatattgtcggacacctgtttcttatcagctatcgtccaaactggcgctatcttggtatgcgtgagagcgcagcgaagagttttgtggatgaggttgaagctgcatggacagaatattgcgatggtatttttggcgaaatggatgccgaggggaagcgtacttttacagagttcatccgtgaaggcgtgggcgttcacgcctttaatggtgaaatttttctccagcctgtctgggacgctgaaaccacgcaggttttccgtacccgattcaaggctgtcagtccgaaacgggtggacacgccggggtatgcccgcggaaaccgccagcttcgcgcaggagtggaaacggaccggaatggaaaagccctcgcctatcatgtctgtgatgatgactggccggtggctggtggggaacgctggacccgtattcctcgttttctgccgtccggacgacccgcgatgttacatattttcgagccggttgaggacggacagacgcgcggtgccaatcagttttacagtgtgatggagcggctgaagatgcttgataccctgcaggcaacgcagcttcagtccgcgattgtcaaagccatgtacgccgccacgatcgaaagcgaactcgattccgagaaagcctttgaatacatcacggcggcagataacaaagatacgccccttgttaacatgctggcaaattatgcccgctattacagtaccaacagtatcaaactgggcggtgtaaaaattccccacctgtacccgggtgatgagctgaatctgcagactgcgcaggattccgataatggcttttcagcgctggagcaggcgctgctccggtatattgccgccgggctgggggtctcttatgagcagctttcgcgtgattattctcaggtcagctattccagcgcccgcgcatctgccaatgagtcctggcgctatttcctggggcggcgccggttcattgccggacggctggcgacacaaatgttttcctgctggctggaggaggcgctgatacggggagttatccgggcaccccgggccaggttttccttctgggaggcccgatccagctggagccgctcggagtggattggtgccggacgtatggcgattgacggactcaaggaggttcaggaatccgtgatgcgtattgaggccgggctgagtacctatgaaaaagaactcgccattatgggcgaggattaccaggagatattccgccagcaggtcagggaatccgaagaacggcgggcagccggactttcgcgtccggtatggatcaccgatacctatcaacaacagatcgcggcgagccgtcagacggaggaggaaaagcgtgcaacgtaatctcccgcacatcatcagccaggcaaccagtgctccgttgctgcttgaacccgcctatgcgcgggttttcttttgcgcgctgggcagggagtcaggcattaacagcctgcacattcccggtaataacgaaagtctggatcagtcggatatggcactggtcacaggcgattttatggcgaccggaaagccgcaggcacgtttttatcaggtagtgaacggtattgcggtattacccgtgaccggaacactggttcataaactcggcggaatgcgtcccttttcagggatgaccggctatgacggtatcactgcccggctacaacaggcggtttcagatccggaggtaaaaggcattctgctggatattgacagtccaggcggtcaggctgccggggcgtttgactgtgctgacatgatttgccggatgcgcgaacagaaacctgtctgggcactggcaaatgaaacagcctgttcggcggccatgttgctggcggcagcctgttcgcaccgccttgtgacccagacgtccagaatgggatcaattggtgtggtgatggcgcataccagctacgccgaaaaactgaaacaggaagggatcgatatcacccttatctattctggcgcacacaaggctgatctgacgcccagccagaaattaccggaaagcgtccatgccgactaccagcagcgaatggacgaggccagaaagatgtttgcagaaaaagtggcccggtacacggggttgtctgtcgatgcggtaatggcgacggaggcggcagtgtatgacgggcaggccattatcactaccggactggcagatggaatggtgaatgctgctgacgccatcggcgtgatggcagaagctatcaacagtaacaagacaggaggcactatgcctgaattaagtgcagctgacgctgtcacgcaggaaaaccagcgcgtaatgggaattctgggttgcccggaggccagggggcatgaggcactggcacagatgctggccgggcagccgggaatgagcgttgctcaggcgaagtctattctggctgccgccgcgccggcggatacgaccagcaccgctgaccgtatccttgccctggaagaagctggtggtcgggaaacactcgcacagacactggcggccatgccggagatgacggtggaacaggccagaaccattctggcagcatcgccgatcgctgcggcaacgtcacttcatgatgccgtgatggcgcttgatgaggcgaaaggccgtgaagagttggcggaaaaactggctgtcatgcctggtatgaccacagatcaggcccgtgacctgctggctgccgcgccggacaaatccggtaatgcggggctgagcatgaacaacgcatttgatgctttcatgcagtctcattccccgggccccatatccggcggtaaagaccacagtaatgataccgaaacgacgttgttgatgagtattcccggtacttcagccacctgataaggagacagcatgtcatttaccaccactattgagaaacgtgcggataaccgcattttcgccggtaacgatccggcacataccgcaacgggagtcagcgggataacggcggccacaccgatgctgacgcccctgatgctggatgataccaccgggaaactggtggcctgggacgggcagaaggccggaacggcggtcggggttctggcccttgagctggacgggtcggaaaacctgctgacgtactggaagagcggcacctttgccacagaatcactggcatggccgaagagtgtggatgccattaagcaggcaaatgcattcgccggaagcgccgtcagtcacgccgctttaccgtaataagaaggccgcgaagcggcctttatcgtatttaacgtccggaggacaccatttatgggattgtttaccacccgccagttgctgggttataccgagcagaaagttaaatttaacccactcttcctgagcctgttttttcgccgtactgtgacatttcctacccaggaagtcatgctggacaaaattaccggaaaaacaccgattgccgcttatgtatctccggtggttggagggaaggttctgcgtaaccgcggcggggaaacgcgcgtactgcgtccggggtatgtcaaaccgaagcatgaagttaactatgcgcaggttgttgagcgtctgccgggtgaagacccggccaggcttaacgatccggcctaccgtcgtctgcgcattctgaccgataacctgaagcaggaagagaaggccatcgtccaggtggaggagatgcaggccgtcagtgcggtgctgaacgggaaatacaccatgcagggcgagcagtttgacaccgtggaggtggattttggtcgctccgccgggaataacattattcaggccacaggtaaaaaatggtcagagcaggacagggaaacctttgacccgacttatgatctggatatgtactgcgaccaggcatccggtctgatcaatattgccgtgatggacgggaaagtctggcgtctgctgaacggttttaagctgttccgtgaaaaactggatacacgccgcggttcaaattctcagctggaaacggcggtgaaggaccttggggctgtggtgtcgttcaaggggtattacggagatttggccattgtggtggctaaaacatcctatgttgctgataacgggaccgaaaagcgttacctgcctgaagggactctggttctgggaaatacggcggcagaaggtatccgctgctatggtgccattcaggattcacaggcgctcgcggagggtattgttgccgccacccgttatcccaaacactggctgacggtgggggacccggcgaatgaatataccatgacgcagtctgcgccgctgatggtcctgccggacccggatgagtttgtcattgtcactgtcggttaagcatcccaaaaggcctgattcaggcctttattgttacaaattgcgggaggatcttttatggcaacaaaagaagagaatatacagcgtctgcgggagcttgcgacgcggcttggtcgtgatccggatgtgtccgggagcgccgctgaactcagccagcgtgtcatggaatgggaagaggaagcggagcggaggcggagcatttgcctgctgtggaaaatgacagtgatgaatccatagtgccgcccgggatcgggcaaagatccgaacgggtacttatcagggcgcttcgtacactacacatctgcgccatcgatccggacagtaaccgggaactggatatggttatggcgggaaacccggcgcgtatttcgcaacacgatgtggacgagctgattgctgcaggacttattattgaactgtaagggtggcgatatgtcgcagtccgaaaacctgtttgataccgcgatttctcaggctgatgatgccatcctccgggtgatgggaacggtagcaacaataacctccggcgttctggcaggggccacgcttacgggcgtatttgacgatcctgaaagtgtgtcgtatgccgccggaggtgtccggattgagggggacaagcctacattttttgtcaaaacatccctgacagtccatctgaagcgcccggacacactaaccattctcggtgacaccttctgggtggatcgcatcactccggctggtggagacagcagtattattctgctgggcagggggacgccgccgacggataaccggcgcaggacgggaggaatgtttgactgctccccggcctaaaggccggggtttcccggaggcattctgatgaaagggcttgaaaatgcgatccggaatctgaacagccttgaccgacagatggttccccgggccagtatctgggctgtgaatcgcgtggcgcagaaagctgtttcagtggcaacccgtaaggtggcgcgggagactgtcgccggagataaccaggtaagaggacttccgctgaagctggttcgccagagggtgaggttatttaaagccggtacagacggtaaacgctctgcccggatacggattaaccggggaaaccttcccgccataaagttgggcgctgcacaggtcaggatgagcaaacggaggggcaaactgctgtatcgcggaagtgtgcttaaaatcgggccatatctgttccgggatgcctttattcagcaactggctaacggacgctggcatgttatgcgacgcgttaacgggaaaaaccgttatccaatcgatgtagtgaaaattcctctttccggaccattgactcaggcattcgaaagcgccacacaaagcttgattgacgaggaaataccgaagcaactggggtatgccctgaaacaacaactgaggctttatctttcacgttgactgctccccgccctgaaggacggggattcccacttcaacgagccgaatctaagccgctttgagcgattcaggatttacaggctctccgtgggctaacactgccagcccggcagctttgatattacgtgccgcgttaacgtcccggtcgtggtcagttccgcactcagggcactgccatttacgaacatcaagaggcatttttttcatgatgaaaccgcaacagctacagcgttttgaggacgggaaaaactggtcaatggctaccactgaccgccccgcccattcgcctttgtaccggagctggcgcacaagttcgccccagctcgcgtctgctattgctttggatagcgacgggttgcggatcatgttcctcactttcagggattcgacgcatacaacttggttatcgttaatcagtttgcgggtggccttgtgcagggcatccagtcggcaatcagcaattttcgcgtggagtcgggctacctttaaacgggctttggcgcggttctttgagcctttggcctttttgcttaaccggcgctggagtagtgccaggcgagccgcgtatttagcggtatggcggggattgccggacctgaatccggtatcggtgacgaacaaatcttttaaaccaacatcaatgccgaccattgaagaggtgatcggcagtgatgcgggttcaaattcgcaaaggcacgaaacaaagtaccgccctgcggcatctttggaaatggtgacggtagacggcacggacggcagcggacgactccagcgcacgtctaaggggattttgttctttgccatgtacagcttgccgtcgcggtatttaaacgcgctcgcagtgaactcagccgcctgcttgtgccgtttgcttttgaaagccggatatgcagcccgtccggcgaagaagttagcaaaggcggtttgttggtggcgcaaagactgctggaggggaacgcaggaaacgtcgttaagccaggcaaattctggctcctttttcagcgccgtaaggcgagcgttggcctgtaggtaaccgatcttttcctttcgctcgtagtacgcatcggtacgccagcggaggatggagttgtagacgaaacgcacacaaccgaacgtctgagctaaaagctcagcctgctcagtcgtggggtaaaaccggtatttatatgcgcgtttcatggcttcacatattaaagaggaaaatgtgattatgcaaaagacagttagccggaaaaccgcctcctttcctccccggccttcaggccggggaggaaaggaggcattctgatgagcaaacacacattaatccgccgggccgttctggaaaagctggaatccgtgactggcgcacctgtcactctttttgatggacttcctgctttcgtagaacaggaagatttacccgcaatagctgtctggctgacagacgcacagtatacaggccttatgaccgatgaggatgactggcaggctactctccatacggcagtttttctgagggctcaggctcctgatacagagcttgatatctggatggaagaaaaaatctttcctgcgctggaagaggttagtggtctggagcgccttatcgataccatgaccccgctgggttatgactaccagcgtgacagcgaaatggcaacgtgggggatggcagaaattacttaccggatcacctataccaactgaggaggatatgatgggaacaccaaacccactggtaaaaacgaaaggcgccggaaccacattctggctgtataccggcagcggcgatgcgtttaaaaatccactggctgatgatgactggctgcgactggcaggtattaaggatctgcagcccggagaaatgagtgcagatgcggaagacgatgactatcttgatgatgaaaatgccgactggaaaagcactacgcaggggcagaaaagcgtcggtgacaccacggccacgctggcctggaaacccggtgagaccggacagaaaaaactggttgagctgtttgacaccggcgaagttcgcgccttccgtatcaggtatcctaacgggacggttgatgtgttccgcggctggctgagttcactgggtaaaaccgtgacgtccaaagaggtgatgacacgcagcgtaaaaatcaccggcgtcgggcgtccttctcttgcggaggaggatacacctgacgtagtcagcgtatccggcgtgaccgttgcgccggccagtgccacggtggctgccggagccaccaccacgctgacatttacggtaaaacctgataacgcgtcagataaaacgctgcaggttgcgaccgccgatccgctgatcgccaccgtcacgctgaaggataatgtggccacggttaaaggcgtgaaggcgggcagcgtgaatattgttggtatcagcagtgacggcagtcttgtcgcggtggcagcagtgacagtgacggcgtcataaccctctcttatcagtccgccccggttccggggcttctatggaaaatcatcatgtttctcaatacagacacctttaactacggtgggcattccatcgtgctcagtgagctttctgccctgcaacgtgtggattatctgaagtttattcagcagcggacggcagactatgacgcacagcctgaaaccctgacggaagcagagcgtcagacagaatttatgcagatgggggtggatattaatgcatggctggtatcccgctccctgtgtgaaagcaaaaaagaggaggaggcccgcgccctgtatgagtccgtcagactggaatggtcttatgaggcgctgggacgtggcgctgatatggttctgtccctgagtggtatgcgtcttccggcatcgcaggaagacgacagcgggagtgaaaaggacacgaccacgccggaaaagtcctgaaccgggagctggcgtttgtgatgcggctcgcgcgtgagttccggcgaccagactggcggcagatgctggcggaaatgagtgcgacagagctgggtgagtgggcggagcatttcgggaagaacagcttcagtgacatgttgctggatgcggagtttgcaacgctgaaatcgctgatttccggactggttacaggcacgcatcacgatgcagaaatgttcagcctgatcactgatcctgagtcgttgcacgaaaaaacggatgatgaactgatgatcctgggcgaaggtattaccggaggtgtccgctatggaccagatagcgaacctggtcattgatttaagtatcgacagcgcagagttccgaaacgaagttccgcgcattaaaaaattgctgaacgatgcggctggtgactcagaacgttcagcggcccggatgcagcgttttctggataagcagacggaggcgacgcgccggacgtccgccagtctggagcaagtgactgccagcagtaccgcgtacagttccgctgtggagaaaagcgcagcggccagtacgcgtctggcggcggatgtggatcagacgcgacagcgggtggaggcactgggaaggaaactgcgtgaggaacaggcgcagtcagcggctgtggcggcagcacaggacaggacaagtgctgctttttaccgccagattgacagtgtaaaacagttaagcggtggtctgcaggagctgcagcgtatccaggcgcaggtacgacaggcgaaaggacgcggagatatctcacagggcgattatctggcgctggtgtctgaaaccgccaggaagacccgtgagcttaccgatgccgaagcgctggccacgcagaaaaaagcacagtttatacgccgcctgaaagagcagacgacggtacagggcctctcccgtaccgagctgctgcgggtgaaggcggctgaactgggtgtcagtagcgccgcagatatttatatccgtaaactggagcgtaccggaactgccacccatacgctaggactgaaaagcgctgctgcccgtcgtgaactgggcgtgctggctggtgagctggcccgtgggaatttcggggcactgcggggaagtggtatcacgctcgctaaccgcgccgggtggatcgagcaactgatgtctccgaagggcatgatgctcggcgggctggctggcggcgtggctgctgctgtttacgggctgggcaaggcctactatgaaggcgctaaggaaagcgagacgttcaataaacagcttattctgaccgggagttatgccggaaaaaccacaggccagcttaatgcgatggcgaagtcgctcgccggaaatggcgtcacgcagcacgatgctgcaggcgtgctggcacaggtggtcggtagcggagcgtttaccgggcaggcaatggcaatggtatcccgtaccgcgaccagaatgcaggaaaacgtgggacaatcagtggatgaaaccatccgccagtttaaacgcctgcgggatgatccggtgaatgcggcgaaagaactggacaggacactgcattttctgacagccacccagcttgaacaaatcagggtactgggcgagcagggaagagtggctgatgccgcgaaaattgccatgtccgcgtattcggaagaaatgaataagcggatgggggacgtacacgacaatctgggctggattgaaagagcatggaatgctgtcggtgatgcggcgaagtgggcatgggatcggatgctggatatcgggcgggaagacacgctcgatgaaaagatcgcgacactgcaggaaaaaatcgcgcgcgacagaaaaacgccctggacggtgtcttcttcccagactgaatacgatcagcagcagctgaacgaacttcaggaacagaaacgccagaaggacctgctggatgcgaaggcgcaggcagagcgtaattatcaggaaacgcagaaacgtcggaacgagcagaacgccgcgctgaaccgggataatgaaactgaatccctgcggcaccaacgggaggtggcgcgcattaccgccatgcagtatgccgatgctgctgtacgcaatgccgcactggagcgcgaaaatgaacgtcataaaaaggcgttgtcacaacaggcgaaaaagccaaagacttaccacaacgacgaggccaggcgactgcttttgcagtacagccagcaacaggcgcagactgaagggcagattaccgccgcgaagctttccacgaccgaaaaaatgacggaagcgcataagcagcttttgtcatttcagcagcgcatcgctgatttgtccggtaaaaaactgacggcggatgaacaaagcgtactggcacataaggatgaaattgcgcttgcgctacagaagctggatatctcacaacaggatttgcaacaccagaatgcccttaatgaactgaagaaaaagacgctcacattgaccagccagctcgctgacgaagaatcccgcgtcaggcaacagcacgcaatggcgctggccacaatgggtatgggcgatcagcaacgtggccgatacgaagagcgtctgaaaattcagcagcactaccaggaacaactggagcagcttaaacgcgacagcaaggcaaaagggacatacggttctgacgaatatcgtcaggcggagcaggcgctgaagggcagtctcgatcgccggctggctgagtgggcggattacaatgcgaaagttgacgctgcgcagggagactggacgctgggggcgtcgcgggcgctggataactttctggcgcagggcggcaatgtggcaggcatgacggagaacgttttcacaaacgcatttaacggcatggcggacagtatcgcgaattttgccgtgaccggaaagggcagtttccggagcctgacggtctccatcctggctgaccttgcaaaaatggaggcacgtattgcggcttctaaactgttgggttcagtgctggcaatgttcggctttggcacatcggcaggcggcagtacaccatcaggggcatacagttctgcggcgctgtcggttattccgaatgcggacggcggcgtgtaccgttcggcaggactcagccagtacagcggcagcattgttaatcgcccgacattttttgcttttgccaaaggtgccggggtgatgggcgaggcaggaccggaggcaatattaccacttcgtcgtggtgctgacggtaagctgggtgtcgtggcagccggttcaggagggatggcgatgtttgcgcctgagtacaacattgaaatccacaacgacgccggcaacggacagattggtccgcaggcattacaggccgtatataacattggaaaaaaagccgccattgatttctggcaacagcagtcgcgtgacgggggtattgctggaggagggcgataacaatggaaacatttaactggaagatccgccctgatatgacagtggaatcagaaccaaaagtcacctccataaaactgggtgacgggtatgaacaacggcgtccagccgggctgaacaaccatctggcgaagtataacgtaacggtccggattcgtaagggagaacatcagaaccttgaggcatttttatcccgccacggtggagtgaaatcctttctctggacgccgccttatacctggacacaaattcgggtgatttgccgcaaatggtcgattaacgttggctctctttgggtgactgtgaccacgacttttgaacaggttgttatctgaggaggagtgatgcaggacatttcgcaggatacgctgaacgaatccgctaaactggcgcagtccgccaggatcactttgtgggaaatcgatctgacacagtctggcggtgatcgttattttttttgtaacgaggcaaatgaaaagggggaggcggttacctggcagggacggaaatatgacgtttatcctgtagacggttgcggatttgaaatgaacggcaaaggcgcagctgcgcgcccgtcactgaaggtatccaatctttacggtatggtgaccggaatggtggaggatttgcatagcctggttggggcgacggtcatccgcaggatagtatatgcccggtttctcgatgccgtgaattttcaaaacggcaaccaggaggctgacccggagcaggaatccgtaagccgatgggtgatcgagcagtgcagtgatctgacggcggtaagtgcgacatttgtcctggcaacaccgactgaaacggacggatgtgtcttccccgggcgaattatgctggccaatacctgtacatggatataccgctctgacgaatgcggttatacgggaccagctgtcgcagatgaatttgataaccctaccgccgatccggcaaaagatgcctgcagccgctgcgcccggggatgcgccctgcgtaacaataccggaaactttggcggtttcctctccattaataaactttcacagtaaatcatcatgaaagaacaggatattctggcgcacgcccgacggtgtgcgcctgcggagtcgtgcggcttcgtggtgagaacacaggcgggagaacggtatctcccctgtgtgaatatttctgccgcgccggaggattatttccgtatggcgccggaggactggctgagggctgaaacgcagggggatattgtggcgctggttcacagccatcctggcggccagccgtatctgagcgatgtggaccgcaggctgcaggttcaaagcgacctgccgtggtggctggtatgcgccggccaggtacataaattccgctgtgtgccacacctgaccggacggcattataaacatggggtttttgactgttacacgctgttccgtgatgcctatcatctggcggggattgatatgccggattttcaccgggacgacgactggtggcggcatggtgacaatctctatctggataatctggagacgacggggttttaccgtgtcagcgcagccagtgcgcagcccggcgacgtgttgatttgctgctttggctcctccgttccgaaccacgcagcgatttactgcggcgacggagagctgctgcaccatattcctgaacaactgagtaaacgtgagaggtataccgacaaatggcaacgacgcacgcactccatctggcgacaccgggcatggcgcgcatctgcctttacggggatctgcaacgattttgccgccgcgtcagcctgcaggtagccagtggtgctgaagctgtccgggcactggcggtacagttgcccggtctccggcagaaactgaacgacggctggtatcaggtacgcatagccggagacgatgttacggctgataccctgacaaccagcctgcatgacccgctgccgcctggcgcggtgattcatattgtgccgcgtctgggcggggccaaatctggcggggtgtttcaggcggtgcttggtgcggcgctgattgccgttgcctggtggaacccggcaggctggctgggagcggcggcggtatccggtatgtatatgaccggggcgtcgatggttctgggcggtgtggcgcagatgctggcaccaaaacctaaaatgtccgaaatgaggcagaccgataacggcaggcagaacacgtatttctcgtcgctggataatatggttgccaacggtaacacgttgccggtgctgtacggcgagatgcaggtggggtcacgcgtgatttcccaggaagtcagtaccgctgatgaaggagatggtggtcaggttgtggtgattggccgctgacaacagaacagattcagacagaaccgcctccgggcggttttgtcgttttacggggtaataaatgggaaagggcggcggaaaagggcatacgccccgcgaggcaccggataaccttaaatccacgcagctgctgagcgtcatcgatgccatcagcgagggaccgatagaaggcccggtgaacggtctgcaaagtgttctggtaaaccagacgccggtggtggaccgcgacggtaacacgaatatccacggcgtgaaggtggtataccgcgtcggtgagcaggaacagaccccgctggagggatttgaatcgtccggcgccgagacggtgcttggtgtacaggtcaaatacgacaatccggtgaccagaaccatcacggctgcaaatattgaccgcctgcgttttacgttcggcgtgcagtcactggtggaggccaacagcaagggcgaccgcaatccgacatcggtcaggctgcaaatccatcttgagcgctatggtcagtgggtggtggaaaaagagattacgattaccgggaaaacaaccacacagtatctggcctcggtgatagtggataatctccctccccggccatttggtatccggatggtacgtgtgacggcagacagtaccactgaccagttacagaacaacacggtctggtcgtcgtataccgagattattgatgtccggcagcgctatcccaacaccgccgtaattggcctgcaggtggagtctgagcagttcggcagccagcaggtgacgcgaaattaccattttttcgggcggattattcatgtgccgtcgaattacgatccggtagcgcgaacctacagcggcatctgggacggcacgttcaagcctgcatacagcaataatccggcgtggtgtctctgggatgtgctgacacatccccgttatggcatgggacagcgaatcggcgcggcggacgtggacaggtgggcgctgtatgcaataggccagtactgcgaccagatggtccctgacggattcggcgggacagagccgcgtatgacctttaatgcgtatctggcacagcagcgtaaggcgtgggatgtgctgaccgacttctgctccgccatgcgttgtatgccggtgtggaacgggcagatgatgaccttcgtgcaggacaggccctcggatacagtctggacctatacccgcagcaatgtggtaatgccggatgagggcacaccgttccgttacagcttcagtgcgcggaaggaccgccataatgcggtagaggtgaactggatcgaccctgataatggctggcagacatccacggaactggtggaagacacggtcgccatcagtcactacggacgcaatctggtaaaaatggatgcgtttggctgtaccagtcgcgggcaggcgcaccgcgccgggctgtggctgataaaaacggagctgctggaaacccagacggttgattttagtgtgggtgcggaggggctgcgccacgttcccggtgatgtgattgaggtttgcgacgaggattatgccggcatcagcctgggcgggcggattctgtccgttgaccgcgcccgccgcattctgacccttgacagggagattaccctgccgtcgtccggcaccacgctgataagcctgatggatggcgaaggcttgccggtcagcgtggacgtgcagtctgttaccgacggtgtgcaggttcaggtcagccggataccggacggcgtggcggaatacagcgtctgggggctgaaactgccgtcgctgcgccagcgtctcttccggtgtgtggctgtccgggaaaacgacgacggaacgtatgccatcaccgccgtacagcatgtgccggaaaaagagtccatcgtggacaacggggcatcattcgatccgcaacccggaacgattcacggcaccgttcccccggcgatacagcatctgaccacagaaattctggcggaggagggacagtatcaggtactggcgcgctgggacacaccgcgagtcgttaagggcgcctcgttttctttgcgcctgaacgtggcggcggaagatggcagtgaccggctggtaagcagcgcaggaacgccggatacgcagtaccggttccgggggctgacgccggggcgctacaccctgtccgtcagggcggtgaacagccagggacaacagggagacccggccagcacacagttcagcatctccgcgccggcggcaccatcatttatcgaactcacccctggctatttccagattacagccacaccgcgtcaggcggtatacgacccgacggtgcagtatgagttctggttttcagacgcgcagattacggatatccatcaggtggaaaacgccgcacgatatctgggaacggcgctgtactggatagcggccagtgtgaatatcaggcccggcagggattactatttttatatccgggcggtaaatcaggtcggtaaatccgcattcgtggaggcgaccgggcaggccagcaacgatgccgcaggctatctggattttttcaaagggcagataactgaaagtcacctgggtaaggaactgctggagaaggtggaactgacggaggataacgccagcaaactgcagcagttttcgaaggagtggcaggatgctaacgataaatggaacgccatgtggggcgtcaaaatagagcagaccaaagacggcaaatattatgtggccggacttggactgagcatggaagacacgcctgacgggaagataagccagttcctggtggcggcggatcgcattgcttatattaacccggcaaacggaaacgagacgcccggattcgtcatgcagggcgaccagataatcatgaatgaggcgttcctgaaatatctgagcgcgccgaccattaccagtggcgggaatcctccggcattttccctgacgccggatggaaagctgactgcgaaaaatgcggatatcagcgggcatatcaacgctgtatctggctcgtttacgggagaaatcaatgccacctccggtaagttttctggcgtgatagaagcaagagagtttgtcggtgatatctgcggctcaaaagtcatgcagggcgtgaacatcagggcgacgaacgacgaacgcagcacctcaacacggtataccgacagcgccacctatcagatagggaaaaccatcacggtgatggctaactgtgagcgtaacggtggctccggtgccatcaccgtcacgataaatattaacggccaggtgaaaacggcggaggttatcccgtataccgcagggcttccggccatgtatcagaccgttgtcttttcggtctacaccacttcacctgtcgtggatatcagcgtttctctgagggttcgtgggcagtacaccacgtctgcttccgtctggccgctggtgatggtttcccggtcggggaacaacttcacaaactgaccggatttccggtctctttcgtttaacaaggaacagatatgactatgtcgcgcgtaatttcgctggcggcagggctttccctgtccgttttattttccactgctgccgttgccgataacggaagaggaagcggcaacagcaatattgaaaaccagacccggatttataccggcaccgaccgtgggcagaaacagcaccgcgaggcaaagggaaaaacaatcacgcggagcgtccagtgttctctgccggcatatttacgtgacccggataatcagtgctgagatgtgaatgaatctgaagcctgcctgcgggcgggcttttttatggaggcaatatgccagtacttatttccggcgtactgaaggatggtacgggaacgccggtacagaactgcaccattcagctgaaggcctgccggaccagtacgacggtggtcgtgaatacggtggcatcagaaaatccggatgacgccgggcgctacagcatggatgtggagcaggggcagtacactgtcacgctcctggtggacgggtatcccccgtcacatgccggagttattacggtttacgatgattcaaagccgggcaccctgaatgattttctgggggccatgacagaagacgacgtccgcccggaggcgctgcggcgttttgaggcgatggtggaagaagttgcccgccaggcatcggaggcatcgcggaatgccaccgccgcagggcaggcatctgaacaggcgcagacatcagcaggtcaggcatcggaaagcgccacggcagcagtgaatgcagccggagcggcagaagcatcagccacacaggcagcctcatccgcagcatctgcggagagcagcgcaggtacggcgaccacaaaagccggggaggcatcagccagcgcggcgtcggctgacacagccagaacggcggcagccgcatcggcagccgcagcgaaaacatctgaagcgaatgcagatgcctcccgtactgccgccggcgattcagctgctgccgcagccgccagcgcgacggcggcgcagacatcagcagagcgcgccggagcatccgaaaccgccgcgaagacgtcagaaacgcaggcggcttccagtgccggtgatgcaggtgcgtcagccactgcggcggcagcgtcggaaaaggcggcagccgcatcggcagccgcagcgaaaacatctgagacaaatgcagcaacgtcagcaagtacagcagcggccagcgcaacagccgcctcgtcatcagcatcggaggcatccactcacgccgccgcatctgataccagcgcatcactggcggcgcaaagcagtactgctgccggagcagcagccaccagagcagaagatgccgcaaaacgggcagaagacatcgcggacgtgatttccctggaagatgccagcctgacgaaaaaaggtatcgttaagttaagcagtgccacggacagtgacagcgaagcgctggcagccacaccaaaggcggtaaaaaccgttataggtgaggtgcaggctaaagccccgctggacagtccggcactgactggtacgccaacagcaccaactccggaaaccacagctgcaggtattgaaattgccacggcagcgtttgtggctgcgaaagtagcacagttggttggttctgcgccggaaacgctggacacgctgaaagaactggctgacgcgctgggtaacgatccgaactttgccaccactgtactgaataaactggcgggcaagcagccgctggacgatacactgacggcgctgtcaggaaaaagcgttgacggtcttatcgaatacgttggtttacgggaaaccataaatcacgccgccgatgcattactaaaatcacagaacggtggcgatattccggaaaagccgctgtttgtacaaaatatcggagcgctccctgcatcaggtacggctgttgcagcgaacagactggcatcacgcggcgcgcttccggcactgactggtacgacaagaggcagcgatagtggcctgataatgggcgaggtttacaacaatggctatccgacgcaatacggaaatattttacgtctgaccggagccggtgatggggaaatcctcattggctggagcgggacaaacggtgcgccagcgcccgcatatattcgcagtcatcgagataccgccgatgctgagtggtccgaatgggcaatgctctacaccacactaaacccacctccggattcgcatccagtaggggcggcgattgcatggccgtctgatgtgctcccggatggtggttatgcttttatgtatgggcagtccttcgataattctgcttacccgttactggctatagcgtatccgtccggcgttatccctgacatgagaggctggacaataaagggtaagcccatcagtggacgtgccgtattgtcgcaagaaatggacggcaataaatcgcactcgcacaccgcgcgggcgcaggatactgacttaggggcaaaatctacctcatcctttgattacggcacgaaatcgaccaataccacgggcaatcatactcaccagttcggcggttatatcaattcatactggggagattccaatcacacctcatttcagcctggaggtggtgcatggacacaggccgctggcgaccatgcacatacagtttatatcggaggacatgagcacaccatgtatatcggtccacacggacacgtcgttattgtggacgcagacggtaatgcggaaaccacggttaaaaatattgcatttaactacatagtgaggctggcataatgacttttaaaatgagcgaacaggcgcagacaattaaaatttttaatcttcgttcagatacaaacgaatttattggcgcaggtgatgcatatatcccgccgcacacgggattaccggcaaactgtactgatctcgcccctcctgatattccctccagtcatatagctgtttttgacgctgaaacccaaacgtggagtctgcaggaggatcaccgcggcgagacggtttacgacacaacaaccggcaatcaggtttatatctccgagcctggtccgttgcccgaaaatgtcacatcagtttcaccagttggtgaataccagaaatgggatggtaaggctaaggtctgggtaaaagacgaagcggctgaaaaagcagcgcagcttcgtcaggcggaagaaaccaaaaacaggctcctgcaaatagcatctgaaaaaatcgcgccgttacaggatgcagtggatctggacgaagcaaccgataaagaaaaagcttctcttctggcatggagaaagtaccgggtacaggtaaaccgtgttgatactttaaagcctgtctggccggagaaaccagccagtagtttataatttgtcaggaaagctcaggccttatttatagcaaatatgaagaaggcctgtctgtcataactgatatggttactggttagtatatataaatttatactcaataacctctacacattttaaaccaatcttcggggaagggcacgtccgcaggccaaagactacacatcttaggtggtatgggcttaattgtttctgctttttgctgatcttgggagtctgccgctattgtaagagcagaatatagtgaggatggtaatattaaagccattgctaaaaatacgctcttaacgtgtttcataatatgttacctgttaaattgtggcacactatccttacggttacagcatcctttactatagatattaaacgttattcattaccatcaggtgagtaaataaaaaccatttataaaatatttaacttaaataaaaatgataagcactattatattttatttcccatgtaaattaattcatatgaaagtgagttcatgtgctcttcaaatcctggctggctcgctcccccggaggaacaggccagttaacattatcaggagtgtttgttatatcaatcaacttcacttcatttttgtaagccagccacactgacagttttgatcctgtccgcgtattgtggacacagccttaagcgaggttctggttttcaaattgctccggactgagatcgccgcagaccctgacggcgcaggctggacgctatcgtttttacattgtacctcaggccccaggttcacttcctcagcaagccggggcgcaccgtagcgctgttttgcctggctgaaggcctctcttacgacattgtcgcagtcctgccggaactgctggtgggtattaacgactgtgcgccttgtttgccaatgccgattccgaactcattctgacgccgatcatcattgccgtgttgctcgcgcctggtttcagcaaaagcaccacgctggctatactgcatttctttttccgcagggagaagtgagtaaatgagtatggaaatggagctttccctataatggtggctgaagctaatcatgtgtcatgtattgcaaatgtcaaagtgataaataaagtttcaacagtctgtgttttttgtgaaaacaactcgctatggtgctaaccctatatgagggactgattgaacatcagatatatcccggcttatttaatactgtttactatgagggtaataatatgttttctcttattaaatgtattagtcgcgacttgatctgacatatggccttgaaaggttgagagttaccggttttgatatgggtgtcgaatccttatacaaaacacgaggtaactctcatgcttcatactaccaatcccgtcatcaaacacaaagccggtttgctcaatctggctgaagagctcagcaacgtgtcgaaagcctgtaaaatcatgggcgtctcgcgcgatacgttttaccgttatcgtgaactggccgatgaaggcggcgttgatgcgctgataaatcgtagtcgccgcgtacctaaccttaagaaccgtaccgatgaggcaactgagcaagctgttgttgattatgccgttgcgttcccggcccatggtcagcaccgaactgcgcaaacaggacgtttttatctccggtagtgatgtccattccgtctggctgcgccacaaccttgagaacttcaaaaaacgcctgaaagcgctggaagaaaaagtggcccgcgatggcattgaactgactgccagatcgccgcgctggagcgtaaagccagtgatgatgaagcctgtggtgagattgaaaccgttcatccgggatatctggggtcacaggacacgttctacgtgggcaacctgaaaggcgttgggcgaatctatcagcagacgttcgttgatacatactcgaaggtggctcactgcaagcgctatatcaccaaaacgccgattacagcggctgatttgctgaatgatcgtgtactgccgttttatgagtctcagggcctgccgatgctaaggatactgacagacaggggtacagaatattgcggcaaagtggaacatcatgattatcagctttatctggagataaatgacatcgaacacacgaaaacgaaggcgatgtccccgcagaccaatggcatctgcgagcggttccataaaacgatactgaacgaattttatcaggtgacgttccgcaaaaagttatatggcgattttgatacattacaatcggatcttgatgaatggctggttcactataataatgagcgaacccatcagggaaaaatgtgctgtggccggacgccgatggaaacgttacttgatggaaaacgcatctggtctgagaagaatttaagccagatgtaatctgacagatacctgtataaataaccggtaactgtcagatcaggtctgagctaatacaactaattgtatgttatttgtcgtttattgctaaatatatatcgttaattgaaggcttgatgcgtgtgtctgcgttaatctcttttcattgtgctgtaaattaggcagtggaatatgtttaatatccgcaatacacaaccttctgtaagtatgcaggctattgctggtgcagcggcaccagaggcatctccggaagaaattgtatgggaaaaaattcaggtttttttcccgcaggaaaattacgaagaagcgcaacagtgtctcgctgaactttgccatccggcccggggaatgttgcctgatcatatcagcagccagtttgcgcgtttaaaagcgcttaccttccccgcgtgggaggagaatattcagtgtaacagggatggtataaatcagttttgtattctggatgcaggcagcaaggagatattgtcaatcactcttgatgatgccgggaactataccgtgaattgtcaggggtacagtgaagcacatgacttcatcatggacacagaaccgggagaggaatgcacagaattcgcggagggggcatccgggacatccctccgccctgccacaacggtttcacagaaggcagcagagtatgatgctgtctggtcaaaatgggaaagggatgcaccagcaggagagtcacccggccgcgcagcagtggtacaggaaatgcgtgattgcctgaataacggcaatccagtgcttaacgtgggagcgtcaggtcttaccaccttaccagaccgtttaccaccgcatattacaacactggttattcctgataataatctgaccagcctgccggagttgccggaaggactacgggagctggaggtctctggtaacctacaactgaccagcctgccatcgctgccgcagggactacagaagctgtgggcctataataattggctggccagcctgccgacgttgccgccaggactaggggatctggcggtctctaataaccagctgaccagcctgccggagatgccgccagcactacgggagctgagggtctctggtaacaacctgaccagcctgccggcgctgccgtcaggactacagaagctgtgggcctataataatcggctgaccagcctgccggagatgtcgccaggactacaggagctggatgtctctcataaccagctgacccgcctgccgcaaagcctcacgggtctgtcttcagcggcacgcgtatatctggacgggaatccactgtctgtacgcactctgcaggctctgcgggacatcattggccattcaggcatcaggatacacttcgatatggcggggccttccgtcccccgggaagcccgggcactgcacctggcggtcgctgactggctgacgtctgcacgggagggggaagcggcccaggcagacagatggcaggcgttcggactggaagataacgccgccgccttcagcctggtcctggacagactgcgtgagacggaaaacttcaaaaaagacgcgggctttaaggcacagatatcatcctggctgacacaactggctgaagatgctgcgctgagagcaaaaacctttgccatggcaacagaggcaacatcaacctgcgaggaccgggtcacacatgccctgcaccagatgaataacgtacaactggtacataatgcagaaaaaggggaatacgacaacaatctccaggggctggtttccacggggcgtgagatgttccgcctggcaacactggaacagattgcccgggaaaaagccggaacactggctttagtcgatgacgttgaggtctatctggcgttccagaataagctgaaggaatcacttgagctgaccagcgtgacgtcagaaatgcgtttctttgacgtttccggcgtgacggtttcagaccttcaggctgcggagcttcaggtgaaaaccgctgaaaacagcgggttcagtaaatggatactgcagtgggggccgttacacagcgtgctggaacgcaaagtgccggaacgctttaacgcgcttcgtgaaaagcaaatatcggattatgaagacacgtaccggaagctgtatgacgaagtgctgaaatcgtccgggctggtcgacgataccgatgcagaacgtactatcggagtaagtgcgatggatagtgcgaaaaaagaatttctggatggcctgcgcgctcttgtggatgaggtgctgggtagctatctgacagcccggtggcgtcttaactgagcacgatattcaccgcaccaggcgaatgtggtgcggtgaacaaagatattcctggacaaacaacatcagacagcactgatgatgcacaggtgaaacaggggagacttcttcagtcagggcgtagcgcaactcaaccttttcgacgataacgcgccgcgcgccgatagtgcgaagttgatggaagtactggaccatcttaatgcaaaagacgggaaggggacgctgtacttcgccgggtaggggatgtcgcaacagtgggctatgaagcgagaaatgctttcacctcggtatacgaccagattttccgatctgccaatagtcaggtaacgggtttgatcagctcttccccttgatttttcacattgccaacggcgcgcttcacggcgtgccaggtaaatttatctgtcggcacggcaccatcagtaattatctcctctacctccttcccgcttatgccctggcgcatccattttcgcgcggtgccaggtgacagaacgagaggacgacggtcgtgaatgtctaccagacctttatcagctgcggaggtaacaatcaggaatccctctgcgtcatcgccgcgctcaaacggtgtactgccaatggcagccatgaatatcggcttcccgtcctttctgtgaatgaaatacggctgtttcttgtcgccttccttcttccactcaaaccaaccatcagcaaacacgatagctcggccatgttgccatagcggtttaaacattctgctggtggccgcagtctcaacccgtgcattaatcagcggtggtttatcccaccatccgggcgcaaatccccagaataccggatccagatgcagttgctcgtcgcgttcactgagcagcagaactttggtaccgggcgccacgttgtaccggcctataggttcagggtcataagcgatatcgcgctcggcttcatcggccagatatgccaggtattcttcgcgggtctgtgcttgtgcaaagcgtccacacatatgaaacctccagtcggtcagactgaaagtatagaagaggatatgcgagtggctgttccggtgtttcttcgagcgacctcaaccaatgtagaagcttcactattgggggttgccactagtagcatcatgttgaatgtactggcgtgaaaaaattggaatcttgaagaaaactcttccccaaaactataatcaacgttttgataatcaatgagttgtaaaagacagttactggatttttttgatagtaggaagaatgataatttcaactttatcaaatggttgatatgtttttggcaatgtaatgctgcgccacatgcagtggttcgaagccgcagacctgattgttaaaggtatggaaggcgcgattgccgcgaagaccgtgacctatgactttgaacgcctgatggaaggcgctaagctgctgaaatgtagtgagtttggtgacgcgattatcgcgaatatgtaataacgataattgttaaaaacaaaaacggggacttaacgtccccgtttttattattagtattcgaacggttatcaaaactttatcaaaactccctcaattcagaccgcaatagtagttcatcctttaccccgatcgtcatgataacctgagacccccctgaaagctgatagttaccgattttgattgtagtggttttcttaataatgtgtgatttggctattttttgaaagtgccttaccagatttattgttattatcaggagaattttttaataaaaagtgatggtttattgactacaatagtgggtaggttaagtattttataaaattattagcatgctttatttgctcttctacaaggctgctaagaagtgttgaaatatcagcctgataaagaatacgtcagcgaaagtgaatgctatattagtcataaaaattcaggagacatatgctcaaacctatctgccatagtggaagtataaaggttccggaatatctggaaacagataaggaaaaaaatgccggacgtactccactgtcttcagacattcagcaagttagaaatgttgttgaagatgttccgctatttccagaaagcagaacggcgagaggttctgtaagcgcagcgtacaggctttcttttgacgaagtgttttgcggtctcagcaatgaagagcgtaaaaaggtgtatggtcgcctttttggaaaacaagtacttgcgcatattcattccaggtgtcagcgcgacgctgacataataagagaaaaagcgctcaggcggataagccgtgagtgtggtgccgaaatagattgcgctctcttactaaataagatggtggatattttacaaaatgcccggctgacaataaattttaatgcagcaaaaattgactttgtctctctcttaaaaaataaagaatatctgaactcttatgcattaggttgcagaccgggagatttacctgcttataatgtcgggcgtgattcagttgaaactaaagcatttgaactggagaagcttgcagattcaccttatgccccatatggtcagacaggcggtttttccgtagcatatactcccaacagtagaacttttagcactacaagcagaccaatttatgctgcactggactttctgaacggtgaaaatggaggtgccagcgcctatgggaaatcattttttgaattaaatgataatgtaaaaacaaactgtacattctcaccttttgatatctacggccacagatttggcctggatacgagtaaattatctacattttggcatatggagaacctgattgcatcctgtcaaaatgatttttttggttataattgctttaagagtttggttaaaatggctaaggacgaaaaatttttagctcattctaattatggtaaaggctatgaagggaattatatagaggctcatattcatggtgatgtatgtttattcagagatataaaacacgtttatttgtctttgcaagaaaactcttactcgaaaagtcaactatatgattatgcaaaacaaataaaccaggcgcttaatagagactgcataatattatattgacaagcttattatcagtctctttaaaagagctttaaatgatcatgagcgcatacttcttgaggtaggcagtaactgcttttatatttattatctcaggaccgttctggcagatacctgtgtggcactttagtgtggtctggcaaaatagaggaatatggaccagcagaagcgcctgctggctgcttttcacttaaaatgctggacttcaccggtgcttcagatgaagcgaccttcacagtcatcaagtggcctgtattaccacaggagtgatttactggctatcgatattcctgctcatatcaatgacagtatttcgctctttcccgtacattgctctcccgaccagctcacggtccagtacatgacagtccttttccacttcgctacgcctaattttttttagttgctctgttttattgcgctgaatttgtacctcaaaacaataattttaaatacttatttgaatattttttttatgattttttcaagaaatgagtaaaaaaaatgaagaatgatataaataattaatgcaataaaaaatgatatcacaccaattgatggtcctgttttgtatacgaataacatgcataaaaatatagcaaatagatcaagggaaatatccgcgatgaaatcagtaattattttgaaaaaattcttcatattacctctttaaaatatctattttattcatcatttttaggtcgggcagtgctcgaaattcttacgtacaacgtatacgctccggtttctgcgcgctgcccggcttcacactggctccaacaagtacgcccgctggaatagattcctggcgtcacataacttcacctggttatccacaaaagactcaataaataaacatcttgagtacgaaaaattacagtgtcagagaatgaaatagcgattcgctgtcttcaagcagtgccttagtacctggcacgcgctctttcgcgctataatttttatcaatgtttgtatcgcctgctattttttaaatgtctgctgtatttcgttcatctttccagctgcttttttacgctgactttcaatgtcttttctcgattgttcaacaagttgctgtgctttttcggcttctttttttggggcgaaaggttctttgatctcatatccggcaatagaaccatccttatttaaggtcattaccgcacgtgctgtatttttagcagtgatggtaatgtcatagacgaattcgccattatgagctatctctgctcgtacaacgatatcgctatcttccgtaacggaaatgatgccactggcgttagcgcgtttaattgtttcctgaatacgctctggtataatgctgaaattgatcgagtcgaatttgaataaagcctcttttagtgcttcttgtttttgctcctctgttatagtgccaaagatggttaaattgacaggcgaaggtcccccccagtagccgttgttaaatttaaacacctctactttagcaggggtgttaacgctttgtcgaatgaatgaatacccgcccttgaagaaacggacttcaataatcgcaagattggctccaccttttgcgttgatattggcaatagctttttgcatttcggctttgtcgtaaaagaacattgattgctggtgctctttttgctggattttttgcatgtatttctcttgatttttttcagcttccgccatggcatctttatcgttatcacaggcgctaattagagttgccgcgatgaaggtaatcggaagtaagagatttttatatgtaacatgtattttattcatgtgaagtatttccctttttatataaaatagatagtcttgactggtcgagactatcctggaaacatagtaataatgcgtgtgcatatctgcagtaagttttagttatgctggttttatttcggatttttacctgttactttttgttcgtaaataggtattttacgtattgatgataagtttagaacctatcccagtaggcgtaatcgttaaagccagtttggcgaataaaagagtctaatgggataggctcttaataaacaacaaaaccaaacgtactttcagatttcaggctggaatgcgcacagctgattgttgataagggctactcataccgacaggccagtgaagcgatgaatgtcggttccacataccggtctgaggtatcaacaacaacatgttctgagtggtagcgtttgcgttatatcgtcacagacagcgcctcagggcgctgttttcgatcggacatgtcgctttcgcaggaggggacgttattcggcgaccagccacatatcagcctcttcaaacatctcttccagcatacggtgcagccgttctttctcggtttttgtacagtcactgtttaatgcgttcgcctgcattggcttaactttcacttgcgcatcgggaaaaagttgatgtacgcgttttgtgagttcattgaggatgatttcgcgtgcgcctggcaaaccttcaacatttcgcttgtcataaacgagttcgacgaacatcgccatttcctttttactggttggatgaccagtatttaagctgggtatataactggtgtcaaggtttagccgccgttttgtcatcctgacgttgcggacgtaaagtaaattgatcgcacgtggaagtaaaggtcgctaacctgttgtcgtgtcaagaggttagcggcactctcttcacagcggtgtcctgctacctgatggtaaattccagggcgcgactaaaatcgcaatcggccaacacaacagggtcgccttttctgacaataatgctatttgtgcccaggcattttcggctctgtttccccttaattttgttatcatcagtgagccagcgctggttatcattacccgtgcatgaataaagaatgattggtgtgccttcttttgtaccttgtcctgcggcatccagacatttctcaccctgcgtgattctgtctcggtgaaatgagaaaagctgagattgcacatgcttacactcccgcagcgtcaaacgattctgttgatctgggcctgcatcaaggcacagaccatcagttgtccgaatttgttccgcgtcatttatgtaataaccaccggaattaatctggttttgtgtaatgaccgggaacgacaaattaatactataaggtgtgggtaagccgttcgtcgtacatccacataaaatagaggagaggcagagaaccagtgtggtttttcctgaaagcaaagtcattcaattattaccctaaaaataaatagcgttacaactatattggcgatttatacccactgaatatgacgtagcattgagcggcaatagagataattccgatagaatcacataaatacttcggttaaatgcgcgcagccagccactcctgtgacaatgggtatatagcgttaaatacttttgcaatattagatgctatcacagtgaaaaacggctgtacatttcttcacgttaaacaaagtgagaagggggggcacccgatatatgataaaagaggtcacaggagtcattagcaaaataaatcttttagattttcgccactgaaaacattctgcagcctttcaggcaaagcctcatagcaggctgcggaggtagacgtactcgctaaatttttctgaaaaaatgccgggtgacgaattatgaaagataaacgttggcggcggtaggtccgcggaggccattaatacgacaaaactcaacgcgtataccggggataagcgcttctgtttcgtgttggcgacatgctgaaatgtggacctgaacatctttgcgtccatcggagggggtgatgagacctttaccgctcttacaatcaaaggttttgacaattcctgtcattttacgagacaaacaaattccttaatggggataacgaggcgcactatacacgtcaggaaaaataatgccagctatatttgatggcaatcaagatttccgggtggctaaaagtagtcgttcggcaccattgtagataaataacattatgttctggagaaagtattccctttcctggcgtcattgactggtgcggacatcatgggttttgtcgtcgggcaggacggtgaactaatctgcctggcttgctttttatcagtatttgtaggtggttgcggggttttactaccaaaatcgtagataaaaatatcccatgatgcctgttgtaaaccagaacaatggcctgaactggccaaaacatggaatgaaaaaataagtaatgaccaaagcataaaagcatgatgtttcatagcacctcctgttatatataatgacttgtgaagttcatctcctgaattatggaacgtcattgacattttttattcaacgaagagttaaccactcttaataataatgggttttatagcgaaatagacttttttatcgcgtgttcaatatttgcgttagttattatttttttggaatgtaaattctctctaaacacaggtgatatttatgttggaattgtggtgttgattctattcttataatataacaagaaatgttgtaactgatagatatattaaaagattaaatcggagcgggaataaagcgtgctaagcatcatcgtgaatatgattacagcgcctgcgatggcatataaccgtattgcggatggagcgtcacgtgaggactgtgaagcacaatgcgatatgttctgattatatggcgagtttgcttaatgacatgtttttagccgaacggtgtcaagtttcttaatgtggttgtgagattttctctttaaatatcaaaatgttgcatgggtgatttgttgttctatagtggctaaacactttatggtttctgttaaatatatatgcgtgagaaaaattagcattcaaatctataaaagttagatgacattgtagaaccggttacctaaatgagcgatagagtgcttcggtagtaaaaatatctttcaggaagtaaacacatcaggagcgatagcggtgaattattcgtggttttgtcgattcggcatagtggcgataactgaatgccggatcggtactgcaggtgtttaaacacaccgtaaataataagtagtattaaggagttgttatgaaaaatattattttatccactttagttattactacaagcgttttggttgtaaatgttgcacaggccgatactaacgccttttccgtggggtatgcacaaagtaaagttcaggatttcaaaaatatccgaggggtaaatgtgaaataccgttatgaggatgactctccggtaagttttatttcctcgctaagttacttatatggagacagacaggcttccgggtctgttgagcctgaaggtattcattaccatgacaagtttgaggtgaagtacggttctttaatggttgggccagcctatcgattgtctgacaatttttcgttatacgcgctggcgggtgtcggcacggtaaaggcgacatttaaagaacattccactcaggatggcgattctttttctaacaaaatttcctcaaggaaaacgggatttgcctggggcgcgggtgtacagatgaatccgctggagaatatcgtcgtcgatgttgggtatgaaggaagcaacatctcctctacaaaaataaacggcttcaacgtcggggttggataccgtttctgaaaagcataagctatgcggaaggttcgccttccgcaccgccagtcaataaaacagggcttctttaccagtgacacgtacctgcctgtcttttctctcttcgtcatactctcttcgtcatagtgacgctgtacataacatctcactagcataagcacagataaaggattgtggtaagcaatcaaggttgctcaggtaggtgataagcaggaaggaaaatctggtgtaaataacgccagatctcacaagattcactctgaaaaattttcctggaattaatcacaatgtcatcaagattttgtgaccgccttcgcatattgtacctgccgctgaacgactactgaaaagtagcaaggtatgtattttatccaggagagcaccttttttgcgcctggcagaagtccccagccgccactagctcagctggatagagcatcaacctcctaagttgatggtgcgaggttcgaggcctcggtggcggtccaatgtggttatcgtataatgttattacctcagtgtcaggctgatgatgtgggttcgactcccactgaccacttcagttttgaataagtattgtctcgcaaccctgttacagaataatttcatttattacgtgacaagatagtcatttataaaaaatgcacaaaaatgttattgtcttttattacttgtgagttgtagatttttcttatgcggtgaatccccctttgcggcggggcgtccagtcaaatagttaatgttcctcgcgaaccatattgactgtggtatggttcaccgggaggcacccggcaccgcaattttttataaaatgaaattcacaccctatggttcagagcggtgtctttttacatcaggtgggcaagcataatgcaggttaacttgaaagatacgatcaatagcagaaaccagtgatttcgtttatggcctggggatttaaccgcgccagagcgtatgcaagaccctggcgcggttggccggtgatcgttcaatagtgcgaatatgaatggttaccagccgctgcgaattctacctgggtcacttaataaagcaaaacatttaaacgctcaacaacgacaattcagacagttcgaacttttctttaaaaataggattaaccatgcttaaaagtggttactaattagccattatactacggtagtgattcacatattctttaacgttacgttacaggaaggttgaagtggaaatgcctgatgagtcttcaggcatttcttaaggttagttagctaaggaacagttactgagaacaggtttatcatcaccttccaccagttcagccgttttgcctttggtataaagtttataagtataatttttgtctatggcttcgtaatttgctccggaggccattttcattaaccgcatcgggatcatctcgtttacctgactgataatcgcataggcgtttccagcctcggtgttgacgtaaatcacctccataacctggttatcattacaggtgtatatagatttagaaatctcctgcgaagctgctatagaggtggtactggcgctaagcgcagcgagaaagagggtaaatgggatcaatttacgtttcatcattagtatcctttgtgcataaaattgtcgttaattccctgaagaacgggagataaagcggcatcaatacgatgaatgctgtagtattcctgtttactgacgaaaagtgcgccagaaaagcgtattataatttatccatcactgacatatgtgatgagtagacaaatcttaaaatcataaactataggctgcaaatcattatggtgcgatagaaaatgattgtcaccactgctcaatactatggcataaaaaccgaagaaaacggtactgttcactgtctcgtttcatacggtatctgtcagtgaaactatttcttcaaatgatggtctttttattatcgatcagataatggcatcaacaggggttattcaggagtatatgtgaaaaagtggcttataggagggatattgatcgcaagttttctgaccggttgtctgatgtggcacaacattgataaatggtttaataaagatatcgaatttttctacgtcggagacgatagctaaaattccagtcagttggcaacgggtgtcatatcttcaggtatggcgcccggagccgccgggcgcaaattgtaggtgtataaaagtcatttcattaaaattttagcgacaacatggacagtcactaccgcgtgctaacggccctctgaagtcacaagatgaataagccagttttttgtttcagcggtgactgaaacatattttgttcctggtggtcttaccgccagttgctgaaaaagacaacgataatgtaactgttgcagagactgacgaatacgacgaccgtgaattttatttttggcgaccatatttcctcccaaaaggccgcccgaaggcggcgctgggtttgataatggagaagggcgttggtcactgccataaccaacctgtatacattaatgcaattgataatcattatcaatttggctggtggagaaaaattgtaaagatgaagggacagcggaaatggcaatgaacgggatgagactttcgttaaccacttaaattcgtgactaaaaaaaggcttttatagacttgaaaatgtttttcccgtccctatgtagtcagtggacaagcaatgcttgccttgatgttgaacttttgaatagtgattcaggaggttaatgatggcactcagaaccttgtcagcacttcccgtgtttgctgattctcttttctctgaccgtttcaaccgtattgatagacttttcagtcaattaacaggagatacgccagtcgctgcgacgccagcttacgatctgcaaaagcgcgatgcgaataactatctgcttaccgtgagcgttcctggctggaaagaggaagagcttgaaattgaaacggttggcggcaacctgaatattacgggtaaacacactgaagagacggtagaggatcagacgcactggatttatcgtggtattcgtaaggcggatttccagttgagtttttctttgcctgaacatgctaaggtgaataatgcgaaactggaacagggcctcttgttggtcgagatttaccaggagatccctgaaagcgagaaaccgaaaaaaattgccatagaaagcaaaccaaaggcgattgaacacaaatcataatcgcgttaatggaggcccgtttagacgggccttcattgtctgtagcgaaaagtatcccgtcatgcttgtaggcacagatcgctaaatattatagccctgacctctatattatcccgtgccactgacctcgtcgccattggacggcggtaagttggaattatccgcgaggtcagtccaatttttgtccactctcgacattctgcctgttatgggcgcgatatctgaacataaattcgtatagcggttcatcgttttcaccgcgttgatgctatttctgctaacactactttcatacgtaaaaaagctgatgctttttaccttatttaatcgaggcaggtatgaaattagcgctcgtcaatcggcaggtcattttaccggaaagcggaaccgagtccttccagtgccatgcctctacgcttgttcgcttaccgtgcggtacgctcgtggccgcatggttcgcggggttgcgcgaaggaagcgaagatacagccatctggctatctcgctatgaacataatatctggacaacaccgcagcgagtggcggcacgcgagggggaagcgcactggaatccggtgttattttacccgtcggataaattgtggttattttataaagtaggcagcgacgtacacgtgtggaaaacctggtttatcacctccagcgatcgaggatttacctggagtacgccagctccgttggttaacgatgatattttgccgcgcggtcccgtaaaaaataaactcctgctggcatcaaatggcgcctggattgcgccagggtcgattgaaagtcctgaacggtggagggcatttgtggatcgatcctctgacgaaggaaaacactggagtatctcttttgtaccgctggagcctgataacgctatttccgggacaaacgtagcgttgtgggatggtataaaaaaggggaggttgtgggaatgttgtctggaaaacctcctgcgctgggatggcgttattcagcctacgctgtgggagtcttctccggggcatatccatatgttgttacgaagcacacgcggggcaatttttcgcagtgattcaatcgactatggcgctacctggtctgttgcccgcgcgacatctttaccgaataataatagtggtatcgatctggttagtatgcaggacggtacgctgattcttgcgttaaatccggtcaacggcaactggggaaagcgctatccgctttcactgattgcttcccaggataatggcgaatcatggctaccgctactggacctggaaagtgaccacggtgagtattcttatcccgctattattagcgagggcggcatcgtacatatcacctacacgtggaaccggaaaaatatcgtatattgtcgattacaaacggtataaggcgctatcagtcgaaaccgatagcgctggaataataatgccttgcccggcgtgctctctcacgccgggatggccgaaatagtcatgatttaccgggtaacatccttgaaaatgtatcgtctttttgtatgtaatggtgaaacaacgccgctgctgcatgcatggcaatcaggaaatagccgatattggccagcatttcatgaatacgctttatatccgattttagggtgctatctggcgtcaaaaataccggtacagtaaaaccaaaaaagctccagcttttcccgcctgacgccatcatcgcgacgcccagcagcggtaaggcgagaaaagtgagataaagcgcgatatgcattaatttagcggctacgtgctgccagtgaggagggggaggcgtaatgaccggatccgggtatttgtgtttaagatataaccgtaaaaacatcagcgcccagaccagaacgcccatatcatagtgcgtgtctttcataaacaggtaaacgctggagccttttggcgcccacccccgtaactcaatagcagcatatgcgatgcctgtcaggagcagtgttaaccagtgaagcgttatttgcagtcttgagaaatgtgccattattattatcctttattaacaactgcttgtagagtatgcgtaaaatcttaacagaaccttaaagcgggggctgagtcgcaaggaacagacagagatagcggcacgtaaaatgggataaaaagccggcggcatcgccggcttactgttgttattgtcctcttacgacaacacaggttttaccataaaacggatatgagcctgtagtttcataatcaacactcgacactaaagaaatatcgcccgcttttttcgctgaatcaatagatgcgtcgccggtatttacaatacccaataccgtttgcgcacacgctttaccggttttggttgccgggagactcgtggcagtaattggccctttaacatccgtatataagccaatccctgtcggtgatggtcctgtagcacaccccgttaaaagagaaccaataaagataattgaaaaaatgtgttttttatttgtcatgggattagtccattataaattaatagaaaacttaccgtccgaaaatgtccggacagtcatttaaaaagtggtgtatattaaatatgcgatattactctttgcaccctcctgttgatgtcgtacctgacggacaaatatccgttgaagccggatatattccccatgccgtgtttttataacttgtgcatcctgtcagcaatgagaacagtacggctaaaaaaatcatcacgagccctggcggcgttaacatttttcggttggactccatagcatgtcatttcatcgggttgccatatgactggcgttctgctggtaagtttcattaacgcccggttcgtttaatattggtttaggtttaaagccaggaggcgctaattacgataccttcttacgtttcagtactgactaataatgttgagaaaatgaacagcgtcgggtgggaagacgcaatacagaatagaagggaaataagagaataagatggcgttaattaacccggtattcctggcgtcatttcccttgcgttttatccccgtcaaaaacggcctttagctcacgttggcgctcccgacgtttgtgcgtatgatgtttttaaaagatcgtcatactttctgttctgcgtcaattttttcattacaaatgctcgccataatgccgtcctcaggaggtctcccgacgtttatgctgcgccgggagaaacaaaaacaacgcataatctgggacaaattgatgattaaaggcaaactggcgctcgtgacgtgcgcgctgactctggtattcacttcgtcgcttttcgccgcgtcggacacggcagacggtcgtaccctgaagctggccattggccctgagccaacggaaggctttgatcctatgctgggctggagccacggcagctacttattgcttcatgcgccgttgcttaagcaaaacgccgacatgagttggggtaatttactgacggaaaaagtggataccagccccgacggtaaaatctggacgctaaccttaaagcccgggctgaaattctccgatggctcgccattaactgccgaagatgtcgtttttacatacaataaagcggcgaagagcggcggtaaaattgacatgggcaattttagccatgcgcgagcgctggacgcacgccgaattgagatgacgctgagccatccgcagagcacctttgtgaatgtactcgggtcgttagggattgttccggccagccgttatgatgaaaaaacgttcgcccgcgaaccgataggcgccggtccgtaccgactggtcagctttcagccgggtcagcaactgatcgttgaagctaatccctggtatgcgggtaaaaagaatgactttaaccggctggtttttgtctttctggatgaagataatgcttatgccgccgcgcgcagcggacagttgggactggtgcgcattgccccttctatggcggtggccccgcagcaggataatcttaaactctgggtacgcgatagcgttgaaaaccggggcattgtcttcccgatggtgccagccggtaaaaaggatgctaacgattatcctgtcggcaacgatgtgaccgctgatgtcgctatcagacgcgcaattaactatgccattaatcgtaagcaactggcggaacaggtgatggaaggccatgcgatacccgcctatagcgcggtgcagggattaccgtggcaaaatccttcagtgatattcagcgatggcgatattgcaaaagcgcgcgccatcctggaagaggctggctggaaaataaacagtgcgggcgtgcgtgaaaaagcaggtaaagaagcgcgtctgaccttatggtatgccagtggcgacagcacccgacgggatctggccgaggcggtgcgcgccatgttgcagcctttaggcattgtcgtctcgttgcaatcgggaagctgggaaactgtagagcgccatatgcacgctaaccctacgctgtttggctggggaagtctggacccgatggaactcttccatcactacagcgggaaagccgctggtgtggaatattataacccgggctattacagcaaccctgcggtagaagcacatctgaaacaggctatagatgcgcctgactggcaaaaggcgattcctttctggcagcaggttgagtgggatggaaagcagggcgcgggcgtccagggcgatgcggcatgggcatggctgcttaatattcagcatacctatctggccaacccctgtattgatctgggaaaaggcgcgccagaaatccacggtagctggtcggtgttaaacaatcttgatgactggacctggacctgtcggtgatgaaattgttcttcagtcattttttgcggctgattattctgttggtgctggtggctgccggcaccttcattttgcttagcttttcgcccgttgatcctatccgtgcttatattggcaacgatctgctccatgttccgccagaacaatatgcgcggattgcggcgcgctgggggcttgaccagccgctgtgggagcgtttcggtcactggttttggcgtctgctccagggcgacatggggtattccatgctgttcaacatgcctgtcgccagtgtgatccgggaacgttttgcgacgtcattcgcgctgctggcaggcgcctggctattgtctggtgtgctgggcgtgacattgggttttctggccggacgttttctccaccgttggccggataagatgatttgccgtatcagctacttattgtcatcgttgcccactttctggatagccatgttgttgctggcgctgtttgccgtccgctggccggtattacctgtttgttgcgcctgggaccccggaaataatgcaggaacagctcttttatcggaacgtttacgccatcttgtgttgccggtatgtgcgttaagtctgttgggcatggggcaaattgcgctgcatacgcgagaaaaaatagccagtgtaatgaagagcgaatttattcgttttgcgcgcgctcagggggataaaggatggtcgctgttacgtcaccaggtgttacgtcatgcgattaccccagcactctgtttacagtttgcttctctgggcgaactgatggggggagcgttactggcagaaaaagtctttgcgtatccggggctgggacaggccactatcgatgccggcctgcgtggcgatgtcccgctactcatggggatcgttttattctgtacactattagtgtttgccggaaatacgatttcagcctggcttgtggtggtgcttaatcgatcgctggagcgtcccgatgctctataatcctgccccgacgttgtttcgtctgctcctctccgttacctgtctgctgtttattgccggatacggttatgccacgttgagccagccgccagaggttaatctgcttgcccggcatctgtcgcctgatatccagcactggtttggcaccgataatctggggcgtgatgtatggcttcgttgctttcagggggccttcaccagtttacaaattggcgttggcgccgcgctgtgcagcggcgttatcgcgttagtgatggcggcagtggcgcgcattcatccccggctggacctcctggtgcggctgataaccgatgctatgctcgccatgccgcatttacttttgctgatccttatctgttttacgctcggcggcggtaaaagcggcgtcattgcggccgtggcgttaacgcactggccccgtctggcgctgattctgcgcgccgacgcggagcgggtagcgcagagtgactacctgacattgacctatcgtctggggcatggacacctttattgctggcgatatcactattttccggcgctattgccgcaatggttgacgggaacgttattgatgtttcctcatgcggtattgcacagcgcggcgttaagttttctggggtttgggctggcgccgcatgagccttcgctggggctgttgctggcggatgcgttacggtttattagccatggaaactggtggctggtgctatttcccggcctaatgttattcacgctggtgatgctcttcgatcagtttgcgcgcgccattcagcggctgtggctaaggagtgacgtatgctgagtttacaacaggttacgctggaaagcgcgcgttatcgctggtatggcgcgagacgctggtcgccgttattacagaatgtctcttttgatatcgcgcccggcgaaatggtggcattggttggcggcagcggggagggcaaaagtctgctgctgcaatgcctgctcgatctgctgccggaaaatttacgctttcggggggagattacgcttgatggcaaccggctggacagacataccatcaggcagcttaggggcaatacgtttagctacgtgccgcagggggtacaggcgcttaatcccatgctgaatatcagaaaacatttgaacagagcatgtcatctgaccggacgcgcctgggatgagacgcaaatggtacagctattacagcaaagcgatcttgaaccgacagtcctggaacgctttccccgccagctctccggtgggatggctaaacgaattctggcgtgccacgcctcgcttagccaggcacgttatatcctcgcggatgagatcaccgcctggcttgataccgcactggcaaaccagttgctcgagcacttgcgaggcctctgcgagcggggatgcggcgtgctgtgggtgactcatgacctgctgctggcggcgcggtatgccgatcgcattgtggcgctgcatcagggttatatcacggacaatatccgctgcgagcagttacagccggaagagatgagtgaaccgttaaaacggcaatggcaagcattgcctgaactaaacccgttatttatgccgaccggagagggaatagaatgctgagctgccgcgacctcgttattcgtcagggcgggaaagtcttatggcagaacctgacgtttacgatttctgccggtgaacgggtaggaattcatgcgccaagcggaacggggaaaacaacgttggggcgcgtcctggccggatggcaaaagccgacggcgggcgacgttctgctggacggcagcccgttacccctgcatcagtattgtccggtacagcttgtcccccagcatcctgaactgacgtttaatccctggcgaagcgccggagacgctgtacgtgatgcctggcagcctgacccggaaacgatgaggcgtttgcatgtgcagcccgagtggctgacgcgtcggccaatgcagctctcaggcggggagttggcgcgtattgcgatactgcgcgcgcttgacccacgaacgcgttttctgattgccgacgaaatgacggcgcaactcgatccgtctattcaaaaagcgatatgggtatacgtgcttgaggtgtgccgcagccgttcattagggatgttggtgattagtcatcagtctgcgctacttgatcaagtctgtacccgccatttacaggtggaatagccgcaagtcgtttctccgcattgccgtgtcgccgttaacgcaccgggaacccatgggttcccggtattgtcggcagagattttactgcatgacgcgtttatctgcgttttttgcatcagcggtattactgtagtccctggtctcttcaacctgtacaggggctctgacaaccagactaggcagcgccagttcgatatcattctcaatgagtttttcaataatacggatatttatctcttgctgaatatccatgtatttattgtaatccgcggtattgacgatatgcaccacctcataggtcagccgatcctgaccaaaggccagtagatgggcgcggtcgaattgtgtttcgccgacatcggtaataatctttttcaccatatcgccgatgaggcgtaacttttccggcggtgtcgcagtggcgacgccaaaagtaaacacgatacgacgcgtttgcatccgcttatagttgtgtatggtttgctgcaacaactgcgcgttcgcacaaacgatctgttcgccgctgaggctacggatgcgagtggttttcaaaccgatatgttcaatcgtaccggctacatcattaaagacgacgaaatcgccgatctcgaagggcttatcgaaaccaatcgatagcgaagcgaagacatcgctcagaacggtttgtaccgccagggcaatagcaataccgcccacgccgaggcttgctaccagtgcggtaatatctacgccgacgttcgccaggatggagagcagcatcatagaccagacgagcacgcgcaaaatcataccaagaatgactaacgtcaccgggtttttattggagcctggggcatacagtaaatgacgcatccatgactgtacgccctgatcaagccaaatcgccatttgaatcgcaaccactaaaaaccaggcgtgagagagggtagagaataaccggtcaggcagggcgacaaagcgcaggctaaagagaaatgcggcaaaaaagattagcatcttactggtctttttcagcatctcgaaaacaataggacgcagccgcccatgagcatcatcctttttatccgggcgttgtagcgctttatagaccacattaagtagccagttgatgagccagtaagtaatgagggtgacgaaaaaaacgaccgccagattgatccagaacgtcgttgacatcagcatcgcaacgatatttagtcgtgctaaatactccattttacctccgatgaaaagcagatgaacattacagtatagacgtcacatcacggaggccgatttccggctttactattgctgttttattcagcacttttgttcaaaaagtatgaaaaagaggggtagccgtttggctatcccggcgtttctgtgcagacttatctactcctcttaataaaataaggagtcatttatgcaacaagaacatcgtgagtgtattgagcagtgttatgaatgcgcggcggcgtgtgatatctgcgcctcttcttgtctgcgtgaagataacgtcgaaatgatgaagcactgcatccagttagatatgcaatgtgcggccatttgtcgcctggcggcgcaatttatggcgttggaaagcgagtactcacaaaaattatgccgcctgtgcgcggatatctgcaaagcctgtgccgaagagtgtgcaaggcacgatcacgaccattgccagaattgcgcgcgggcatgcagccaatgcgcagacgcctgccttaaaatggccgcgtaatttttcttccgccattagctcaaccggatagagcatagagcttctacctctaaggttcggggttcaattcctcgatggcggaccagttgatatcaaaaaaggccacctgcgcggtggccgctgagtttctgttgaaataaatgcaatgttataatataacaatcatctttctaagaaagatgagggtaacgttttggtgattcatttaaaaaaactgacaatgcttctgggaatgctgttggtaaatagtcctgccttcgcgcatggtcatcatgctcatggcgcgccgatgacggaggttgagcaaaaagcggcagcgggcgtgtttgatgacgctaatgtacgcgatcgcgcgctcaccgactgggatggtatgtggcaatccgtctatccttatctggtcagcggcgagctggaccctgtcttcaggcaaaaggcgaagaaagacccggagaaaacgtttgaggatattaaagcgtattatcgcaaaggatacgtgacgaatgttgagacgatcggcattgaaaatggcgttatagaattccatcgcgacaataacgttgcatcctgtaaatacaattatgccggctataaaattctgacttacgcatcgggtaaaaaaggggtgcgctacctgttcgaatgtaaagatgcgaatagcaaagcgcctaaatatgttcagtttagcgatcatatcattgccccgcgcaaatcggcgcacttccatatctttatgggaaatacctcgcagcaggcattgttgcaagagatggaaaactggcctacctattatccttatcagttaaaggcgaatgaggtcgttgacgaaatgctacatcattaagtctgattgcaatgttaaaagctcgctatgaatagcgagctttttttctgccgttatgccatatttctggcaatcaatataaaaaatacctgcgcccccggagcgatgatgacgctgtccataccgccctcgattcaatgccaaacggaagcggcatgtcgcctgattactcgtgtcacaggcgatacgttgcgtgctattcatttatatggttccgctgtcgcgggcggtctgaagccaaacagcgacattgatctgctggtgacaatatgccagccgctgacggaggcccaacgcgcaacgctgatgcaggaattgctggcgctttcatcgccgccgggggcgtcggcagaaaaacgcgctctggaggtcactgtcgtgctttattcgcagctggttccctggtgttttccaccttccagggaaatgcaatttggcgagtggctaagagaggacatttgtcaggggatttatgaaccagcgcagcaggactgggacatggtgttactgataacccaaattctggaaaccagtataccgctaaagggagaacgcgcggaacggctgttcacgccagcccctgcggcgcagttgctgaaggccttgcgttatcccctcgacctttggcaatccacggcagatgtgcagggagatgagtatcatatcgttttaaccctggcgcgtatctggtataccctttctaccgggagatttacctctaaggatgcggcggctgactggctgttacctcagttgccagaagattatgctgccacgttgcgtgcggcgcagcgtgaatatttaggtctggagcaacaggactggcatattttgctgcctgcggtcgtacgctttgtggattttgccaaagcgcacatccccacgcagttcacataagatgccccaggacgtctgtcaggttgcgcaaacggcgttcctcaactactacttaataggttctcatcgctgaagtaagcagatgatcttatgcgggccatcgaatggatattcccacatggctctcgttttgttgaggtggatatgactggttccgcatcatctgttttaaagacagatacaagactattgagcgaaaacctgtttcttaattatggtctggagtccttatttaaggacgtcgcaataatagctggcaacgtaaattatattatttttgatatcgacgattactacaccgtacagcagtatattacttccacatttaaaacggtactcattggaattgttacccataatgaatataactttattgatgaacatcatgtcatatatcgaataaaggtcgatgcctctattgctgagtggcgcgaattactgattttggccgctgctggtcaattttttcccaggtcagagaaagtcagattaacggcgaatgaaagaaatgttttggcgatgcttgttaaaggaatggatatccgacaaataagctgtgagctgaatgtacatttaaaaactatttactcagtacgctaccatgttctgactaaattaggttgtagaacagttctggattatcaaatactgtccgtttctaaagcctttacgcactggcttacaataaataatgttgataatgtaatttcccgtgtaaatagtaaggtcattgcttaataatgatttgcttctgatggcgtttaggttcactatgctttcttacatcatcatgaggccagacaggcatggctacttttagtattagcgcaatggcggcgcagtgtggtgtcacaacagcaaatatcaggtcctgggaacgctatggcctgcttcaacctaccaaagatgaagctggcaatcgtttttattgcatagaagatgctatcagaatacagcatattatcgacgcgttaagcaaaggcttttcattaaaagagattaaacctgccctctatggtgaagaaacgcattgccgctcgggatggttattctaccaggaagagattttagcgcagtgtagaaaattcgaacccgccaaattgcgaaaattactctggcgttatggtcgggaaattccgccgtgtatcgtcattgagtcaatactgcgtcctttacggctgtggttgtccgcaggcgatgatgatgcacgccgatttgaaaaggcattactggatactgcgattattgaatacgccacgttccagctaagtagcgtacgaaaggcgccagcaggcacaatgcttattgctgcgttttcgctgaacgaccccattgagctatggctggaaacgattaaatattgtagtgaaggtatgcgagttgaagtcatcccctggcaggcgccgatgcccgatcttttatcaacgtctttcgagcatattgttctgtggcatgatgagacattaactcccgcgcaggaaaatcttattcaggctttaaaagaatcgggtaaatttagtcttcatgtgaaaaatggctcaggcttaacattactgccagccgtatatcggcagcatgagatgccagaaagcatgcagcatgttgcaccgcaaatccatgcaaacggctacgaaaaatcaggcaccgcacgttgaggcatctgcattattaacgaacaggggaggagtaaacccctcccttgtttatactcttcatacttcaagttgcttatgtgttggctacggattactcggcccatccatgggcctcgccctgacgggccgtcgcacgcgacgttcaaatctgctcccggcagatttgtcgttcaccccagtcatatagttatctatgcttctggggactcactcccttgccgcctttaagcaactcgaattattttgggtatatattagatgtcgtcaggtgtctgaaacaaaacggcttctaaggcattacggtaaatatcaagctgcactacgtctttttctgtttccagtttttcaataagtttggcgatgacatccttatttgagacatgctgctgcgattgcaatagttcgtaagtaatttcctgaatagctcgctgttcacataacatatgtgcagaaaaaggattgccagtactattttgttcgttgactagtgtaatggtagtcatatttcaccatattcgatgtaaattgaagccgatctccctgagcgggggagagaaattagtgacctattaaagttagacctatatcataaaactgtaataaaaaatcataaaaacgtgatgcgcatcacatttgtgtgatttgttgtatattttatacactttaaatgaagattccgcagaatcaacggcctgttcttttttctcactccagtttaaacgaataagcattaatacccatctgtaataattacttaatgttatcttaataaaggtaaattactgtcaggcctccgtaaaaggaggttgattaatgattcgtcatatcgccatttttctttgttctttattgatgtgcagcaccacttttgccgattcggtaacgtcggtatcgcttggcgcgctcttaaccgcgctcaatgaacgcatgttattaatgaaagatgtggctgcttataaaatgaagcaccatctgccgatagaggatttcacacgtgaacaaaatgtttttgccgaggctgaagaagaagcgaaaaataacggtctggacccgcattcgataaccccttttattcgttcgctaatggatgccagtaaagcgatacagtaccgctatttagcgcagtggcgaaccggctcagaaccctcctttccgatacaaaccttgtcggtcacccggcaacgtattcgacaacttgataatcaaatgttgatcattatcagccagcgcttgatggtcggcgctttcagccacgacgatatggtgtggctgagagcgcagtttaatgcgccgaatctgaatgagagcgatatcagtaatgtgttggcagccttatctttggtgcgacgcgcgcgttaactccacatgaggagaggtgggccaatacctggtgattgcctgcggaggtagcgataaaagaacgcttttaggtgatttggatataagcgtggcggaatagcggctggagagacgtggtttcgcttcccatcttccggtgcattcgttagcatactgtttcgcagctaagcgtaaatgttttcaggaagaggttaatgtgttcgcggagtatggtgttctgaattattggacgtacctggttggggcgatttttatcgttctggtaccggggccgaatacgctttttgtgcttaaaaacagcgtgggacgcggggttaaaggaggatatcttgccgcatgcggcgtgtttatcggcgatgcgatattaatgtttctggcgtatgcgggcgtggcgacgctgatcaaaacaacgccggttctgtttaacattgttcgctatctcggcgcgttttatctgctctaccttggcgcaaaaatcctttacgccacgctgacctcaaaagggcgtgcggcgacggaaacggtagttccttttggcgctatttttaagcgtgctttaattcttagcctgacgaatcctaaagccatacttttttatgtttccttttttgtgcaatttattgacgttactgcgccgcatactggggtgtcattttttattttggccaccacccttgaaatcgtcagtttttgctatctgagctttttaattctttctggcgcttttgtaacccactatattggtaccaaaaagaaactggcaaaagtgggcaattctttgattggccttcttttcgtcggatttgccgcccggctggcaacgctccagtcttaaccacctggacccgtcgtcaacggcgggtcattgctctcctttcggttttattgcgtggaaaacagcaaaatagtaaccaataaatggtatttaaaatactgtttttggagcgtaacctttttacgacagcgatgagattatcgctgagtaacctgcgtgaagagggaagcaaatgcggcaaattccacaaaatcatattcatacacgttccacgccattctggaacaaagagacggcgcctgccggaattttcgaacgccaccttgataagggaacgcgacccggcgtttatcctcgtctctcggtgatgcagggggcggtcaaatatctcggatacgctgatgaacattgctctgagccggaagagatcatggtgatcaatgccggcgagtttggcgtgtttcctccggaaaagtggcacaatattgaggtcatgacggatgatacctattttaacatcgacttttttgtcgcgccggaagtactgatggaaggggcgacctcacgaaaagtcattcatgccgggagagaataataatgggaaaagctacttataccgtcacggtcacgaataatagcaacggcgtctctgtggactatgaaacggaagcaccgatgacgttgctggtacctgaagttgcagcagaagttgtgaaggatttggtcaataccgtgcgttcctacgataccgaaaacgaacacgacgtttgcggttggtaaggatcttgtagtatctatttgatataaagtgattttttaaatcagaagccgcatcgcgcgtcgccagcgtgatgcggtttttgcgtattgaaaagcgctgtttatttacatcagacatgggttgaaaagaaacattaagaaaacattaagaatatcgcattgtttgctaatgagagcgtattcataaaacttatgattgggtattaaaaaccagaagagtcttataatcatgaaactcgatacccgattaacttcgtcagcacttactcttgcgcttgccgctgtggtcatcccgtttacggcggactggcaattgcctttgcttaacggcgtggtggtccgatggattgaaaacggacaagcgttatggttactgtttggggcgctatttaccgcctggtatatacggccactttcccgtcccgaaggggcaaagcagttttggctatgggctgttgtctggtgggtggtgctattgggtagaagcaccagttgggggcgtgactatttccctgacgagccgcgtatgctgttcagaacgatttcagtgatattaattgctgcgttagtcttgccagtcctgttttctgccgggctacgtaaggagattgttcgtcgcctacgggacgttcctctgccattgtggctgtttgccgtgacgacatgttcatatctgatttccgacactgtcgagcatcatcggtggttgtcgccgatattcctgcataacgctcgttacacggatttgattgaagagctttatgaagtgccatttatgatcggtttgtttatggtgaccgtggggtttatgcagcaggacaagcaggatgaatgtacggcgctggagatgaccccgtatcacgcaaaatagcgcggctgaaaaaagaccatgaattcgacatgggatagatagcggttagcaaaaaaagcccgcactcggtgaggcgggcaaataatactggaagcaatgtgagcaatgtcgtaccgaacaggtgggttataaactcaaccactcggtattgataaagataatcgttatcattaatgattgcaaccctgatatttatgcgcttttatccacgacgctaaaaggtgatggacatcacaaacttcactttcctgacgatgtgctattctttttaacggcaaataaaccgctaacgttaagacataagtgaggaaaaaatgggcattctttcatggattatttttggacttattgcgggtattttggctaagtggatcatgccaggtaaagatggcggcggattctttatgacgatcattctggggatcgttggtgcggtagtcggaggatggatcagtacgttctttggctttggcaaagtggatggtttcaacttcggcagctttgcagtcgcggtgatcggcgcgattgtcgtgctgttaatctacagaaaaatcaaaagctaaacgcagaactttcagagataataaaggctacgacaggtagcctttattattcaaaatgaatttaccaccagcccagttcggtacccgccaccgcaattagcgcgatgcccatcaacaccatcgttgttttcctcatggttatgctcccggcgcggcgtaaccgccaataaaaaaccatgccaaaaataatattgccgtaatgaaaatgacgacagggaagaggatacccactctcatgctattaccttcactgttcagggggcgccagaatagcagggttttctcagcgacaaaaggttggttgctttgtgacagggcgtggctattgctgacttaacccgggataaacacccactaaagcgctgacagaaagtatggaaatagcgtacccgccaggttatcctggacaaaatatcgctttaaggagtcgttatgaaatttacgtggattgcgttgccaggcgtattgctgctgagcgcttgttcatcgtcgcaacccaacgcccccaggccgccgcgtattgggatgcctaatccggcagccgtctactgtgagcaacagggcggtacgctgatgccggtgcagaccccacaaggcgtgcgttccgattgcaaattgcccaatggcgaaatcattgatgagtggacattatggcgcagagagcaccctgatacgaaaaagtgacaacctgcggtccgacgggatatgattaagaacaatctgataatgagtttcatgcggcgcaagaaaatatgtttcagttaaagccgggcgcgttggcaatagttattggcgctaaaacacccgccggacggcagaatattggtaaatcggttgagctattttgcctgtgccaacccggagatgaattcattaatccagtaaatggacacgtcaccttactgccgaaagaagcgcctcgggcgctgtggctggttacgggcgacgtagcctccgccgatggccagcacggttttgcctgggtgcgggcagaacatttgatgccgttgtccccggacagacaaccaggccaggcggcggcacgacaatcacagctctcgtagccactctgccagcacaatggcatggttctggcgagtatctttagcggcgtatagcaacgttagcggctggtgtcgggcaatatccgccagacgtttgccttcttgatgctgttgcgcaagttctgcccggtattgctgcgcgaagtggttaaaatcaatcagttcgctatgaaaggctttgcgcaattcggtggagggcgtaatggccttattccattcatcatagaccagcgctgcttttttaatgcctcgcggccatagcctgtcaaccaatacccgataaccatcgtctttttccgccgggaaatagacgcgcttacactggattcgcatttttccctcctgtgatggtgtcgcttacggtacttttgtcggatagcggtaatgattttaatggatcaggcctgataaacgaagcgtcatcaggcattcaagtgggtatcaggtttatttatgacgctatctctcgatcgcgtccggcgtagaggccgaaaatcgccatgatgatagccagaaccgtcacgcctgacagcggtagataccagctaccgctggcatcatgaagttttcccatgacgggcggcccacatgccgccagtaaatacccgaccgactgcgccatgccggaaagcgccgccgcctgatgcgccgaactggcgcgcaggccgataaacgtcaggccgaggatcatcgtcgcgcctgaaccgaagccgaacagtagcgtccagatgatcgcctggcccggcacaaaccaaagccccgccgcgcccactgcgcacaatagtgagaccagcgcggcaatccagcgttgatcgttaaagcgatgcaaaataagcggaatagctaacccaggcgccgcggtcgccagttgcagcaggccatgtagcgatcctgcctgtgcttcgctgtaaccgtggctgatgagtattgttggtaaccagccgataatcacataataaatcagtgagttaagtcccagaaacaacgtaacttgccaggctaaaggcgaacgccagataccgcgttcatgtaatgcccgggagctactcaggttagctgagcgggtagtgcgccactgcggcaaccagataagaaacgccaacagcggaaacagcatcagcattaacagcgcgccgcgccagccaaaaccgtgcaacgccagcggaaccaccagcgcggaccccaacgcggcggcggcgcccatcgtcaatgaatacgcgcccgtcagcctggcgacatgttgtgaaaaatcgcgcttaatcaatcctggtagcagcacattacccagcgctatcccgcacccaataatggcagttccggcaaacaacaatgcagcggagggcagggagcggagagcaatacccgcgcaaatcagcagcattgcggcaaacagactgcgttccatcccaaaccggcgggcaataccggccgccagcggcgaaaccagtgcaaacgccagaagcggcaaggttgttagcaggcccgtctgggcggtggaaagaccgtaatccgaacggattgtctccagcaacggcgcagcgccggtaaatgttacgcgcagcgtagtggctatcatcaaaataccggcaatcagtaaagcgccctgtttgccgcgtggtgaaagggctgtcgtcatcgttttctcatctcgtcaggcgaggcgataccttaacagtttttactgtttggatgaatcaagctaaaatgacaatttatcgctaaaatcggacaatataatgattggtctgagactggacggttacgatcccgaccttcaccacgatgccgctgtggccttttgtattcgcgccagggatgatgaactgtttagccctcgccatcagcatcgcaagggacagttgattctcgctctgcacggcgcgattacctgcgaggtggaaaatgcgatgtggatggttccgccccagtatgccgtctggctccccggctcgctgccgcacagtaatcatgtgaccgcaggggcggagctgtgctttttatttattgaacctgcggcggtcgtcatgccggagcgttgctgcacgctgaaaatttcgccgttatgccgggagttgattttgtcgctggcgcgcagaaccgatcccgaaagagcgcaaatgccaacgcagcgccttattcaggtgttgtttgatgaactgccgcagcagccgcaggaacaattgcaattaccggtatcggggcatccgaaaatccgccaaatggttgagacaatggcgcaggagcccgcgcgatggaatacattagggcagtgggccagcgtattcgcgatgagcgagcgtaaccttgcccggctggtcgtcaaagagacgggactaagctttcgtcgctggcgtcatcagttgcaattaatcctggcgctacaagcgctgatcgcgggacgtaatgtacagcagacggcgcaaatgctgggttatgattccaccacggcattcattaccatgtttaaaaaaggcctggggcagacgccaggccagtatctgacgggcgagttactgcttccccacaattaaagagaccagccccgccgcaatcagtgggccgaccggcacgccgcgaaacagcgcgacgccaagtaccgtaccgaccagcagcccggcgacgagctgcggttggtttcccatcagcgtaatgccgcgaccgcccagccaggagacgaaaacgccgacggcaatcgcgaccagcgatttccagttcacaaaagagtggatcaatgtggagggcggtagggttccgctggcgatgggagccattacgccgatggtcagaatgataatcccgacggtgagtccctgtttttcaatccagggaaaaaaggtattcaacggggttacgcggacaataatcagcaccagaattgagacggcgacagtggtgttgtggctgataaatcccagagctgccagtccgagcaggatcagcagagtgacatcaaacattatggtttccttgccaaaaagtaagcctgactactttacgcccaaacggcaaagcgcacaggcctttttaacgattgatgcggatttcaggcaactgcctgaaagacaatctctacgtgaaaaacggcgttgtcattaaattgccatcaacgccgcgtattgctaacaggtgaaccgtcattgttgtcttcctgaggatacaattatgtacgatccaccgtttcttgaagcgctgatgattacggcgtcgtttttcgccatttttatcattatcgttgtgtcggtattgctccttgaagggggaggggactaagccgttggcgatgactgaaagcggcggaagactgccagttctggtcgggcgatgcgcagatagtcctgtgtattcataatgactgatttttccagcaggccggcattaaaggcaatttcatcgaaacgctcaaacaggagcggatcggcgaccagtttcagattggggtgaaaactgaaaggcgggatcgcgccaaaaacgcagccggtcagcatatcgacttccgccgggctggcaagggaagcgcgtaagccgcccagatgtgaagcaagctgagagaggtcggcttgctgatcggccgccagaatagcaagaacgtgctggttgacgccgttgcctttgactttacagaccagcgcttttgcgccctggcccagcgcagtaccacgtatttcagataccgcttcgcatttccctaccgcttcatggttcaccacacgatagcgcgcgttctcctgggttaataaagccactaaacgttggtgtgtagcgacacccttcgcgacttcagtcatttcggccatttctcactcctggtgcaatatgaacatttactgcgaagcactatgatgaacgatgttgtttttgttgtttgttcagatagagctgcgcatcggaagcctggtaggcatcattaatcgtatcattgggctgcatattataaatcccggcagaaaaatggactgtcttatccggtgcgataatttgcaggttacgaataatacgctccggcagatggatagccaaatccgccgcgtaatcaacaagaataatacagaactcatcgccgccgaggcgaatggcgtaatcgcttttacgaatcgatgttttaatcgctttcgccaacagggttataattcggtcgccttcctggtgcccctgggtatcgttgatcagttttaacctatcgcaatcaatagcgacaaatgtcaccggcgtcccggtattgaccaggcgttgcagtcgctgttccagcaccggtgttaatattttacggttgtaaagcccggtcatggcatcgctaatattttcgcgtgtgacgttgcgataaagccgaaagtgcatccgtaccatattaagcaggagcgccgttgccagtaagtaaaaggccagcgctttccaggacgagacaaggaaataggttaaatcaagggacaacgaaacgcgcagcccaccagggatatcatggctataattcacatattgaaacagattatttttgctttgattaataataatttcttttccggagtccatatcctttagtgttacgttaagataacgccaaaccagcggacggtcctgggtataaaaaatattttttaaattatcctggttaacatccaccatcacgatgccttttaacgatcccgccagatagactggcgttaaaaaactcatgacgttttcctgagtaatatcatccatgtagatacttgaaataaccgtacggccggtaaaaagtttatctatatcttttctgttaatacccattgtgcctttttgtaaaaaagtccaacgatgcatggcgaagcgccgtgagttgattaaatcatagaaatagacataatgtttatttaaatcaacgtaataacggaatttaagctccagtgtgcccagcccgtgactatggtcgtcctgcgaacggttgatgcttaccgcctgatcaaatgcaggcagtaaaagggcgtcatcaagattatcggtacactgtgtagcggcggtttgcagagtaccatgtagcgccggataattatgccgggtcaggttgacaccgtgcgtaccgttaatagcttcaaaggcgtcgcaaaacgcgcggtgtttttctgcggtgacggggtctcccggcgcttcaaaagttcgcatcaaatgtgcggcgatgctctgattctggtacttatcgtacaaaaacgacgaatcggctctctccatgatataacgcatataggcattcattgccctgtcgctggcaataagttcgtaaatcaggaaggacgatgtcaaaacgatgacgcttgccgagataaagtgcctgagcgctttatgatgcaaattcatgatgaactacagccctgaaagtcggatgcgttagtttaccatagcgatgagaattcctctaatagactgtttaaaaataaaacgtgttgatgttatggaataaaaatcattctcgatttaataaattcaataatatatggtgttgatattttcagtcgtgactattgtcgcaaaaagtaaattgttaattaacggcatcgatttaacactaacgaaaataaaatagcctttattattacgcgaaaggagtgtgaagtggtaaggataataatgtacttccgttcggaggcactatgaaacgatttaaagaaatggcaacaatttttctttttgcattgctggctgcggggttcacgtcgtctgctatggcagcgtcgggtagtgatagtccgtgggattttgatttttcgggtccatggcttttttgcaaactacaaccccctgattctctgcaattaccgccacctcctggtgagtattgctggcattaataaatccatagtatttcagtgataagtcggcgcatgtaaggttaatccagtcaggagatatacaggtttacggctattatagtggtagtatgtataattgccttgttagtgataaatcagcccgtgactcattacgggctgatttatggttatgcactttgattggcgctctgtttctgaaacaattcgcggaataccggataaatatcctcctgatcgcgaatatgctgcatggcgaagttatcgaacgtcgcctgcagatgttcatactcgcgccataaggtctggtgggcgcggcgggtaatctcgatatagctgtaatagcgcactaccggcagcagctttttcgccagaatctcatgacacagcggtgaatcgtcggcccagttatcaccgtctgacgcttgcgccgcatagatgttccactgaccggggtcgtagcgctctttaaccacttcgtccatgagtttaagcgcgctggagacaatcgtcccgccggtctcttgcgaataaaagaactcatgttcgtccacttccttcgcctgggtatggtggcggatataaaccacttcgacgttcttatacgttcggctcaaaaacagatagagcagaatgtaaaaacgcttggccatatctttggttgcctggtccatcgaacccgagacgtccatcagacagaacatcaccgcctggctggagggctcaggccgtttttcataatttttatagcgtaaatcaaaggtgtcgataaacggcactcgctcgattttagcccgtagttcggcaatctcccgacgtaaccgctcctcttcaagcagttgcgctggttcgctgtggctgatggtctccagttccgtttccagcgcgtgcagttcgcggcgttttcctgccgtcattgctgtacggcgcgccagagagttttgtagcgaacgtaccacgctgatattggccggtacgccgtttgaggtgaaaccggcgcggtgagttttatactcgttaagctggcgatgctggtttttcttcagattaggcagcgctaaatcttcaaagagcagatccagatactcatcttttgaaatctgaaaaacaaactcatcctggccttcgccgtcctggctggcctgaccttgaccgctgccggaaccgccgccgccaccgccttgcggacgctcaatgcgatcattctggataaagtgatcgttacccggatggacgcgatggcgcagaccgccgcgcccctgatgaaacatcggttcgctaatatcatcggttggaatagagacggactctccgctgtcgacatcggtcacagagcgtttattaatcgcttcggaaatcgactgcttaatttgtgctttataacgacgcaaaaagcgctggcgattcaccgtgcttttatttttgccgttaagacgtcggtctatgaaccaggtcatatgccccccgtactgccaactgagcgcctgttctgtcagtgccggatagcgctaacgcttagccagtctacagaacattactttgtaggcccggtaagcgcaagcgccaccgggcattaacatcacgacgatttacgcacgcgcaggtaccactcgcacagcaaacgaacctgtttacgggtataccctttttccatcatccgatcgacaaagtcgtcatgctttttctgctcgtcagtcgacgttttggcgttaaaagaaatgaccggcaacagctcttcagtattggagaacatttttttctcaatcaccgtgcgcagcttctcgtaactggtccagtttggattacggccgctattgttggctctggcgcgcaggacaaagtttactatctcattacggaaatctttcgggttactgatacccgctggtttttcaattttttccagttcggcgttcagcgactcgcgatcgaacagttgaccggtatccgggtcgcgatactcctgatcctgaatccagaaatccgcataagtcacgtaacgatcaaaaatgttctgcccgtactcagagtaagattcgagataggccgtctggatctccttgccgataaattcggcgtatttcgggatcaggtagcctttcaggaactccagataacgctcagcctgctcctgcgggaactgctcgcgctcgatttgttgttccagaacgtagaacagatgtaccgggtttgccgccacttccgcatggtcgaagttgaatacgcgggagaggatcttaaaggcgaatcgggtggagagaccgttcatcccttcatccacgcccgcatagtcgcgatactcctggtacgatttggctttagggtcggtatctttcaggctttcaccgtcataaacgcgcattttcgagtaaatactggaattttccggctctttcaggcgggaaagaatcgagaaacgcgaaagcgtttccaacgtgcccggcgcgcagggcgcatgagccagctcgctatgattaagcagtttctcgtagattttgatctcttcggagattcgcaggcaataaggcaccttcacaatatagacacggtcgaggaacgcttcgttatttttattgttacggaaagtcacccattcagattcgtttgagtgggcaagtatgatgccattaaagggcagggcggaaataccttccgtaccattgtagttaccttcctgggttgcggtcagcaaggggtgcagcaccttaataggcgctttaaacatctcgacgaactccatgatcccctggttagcgcggcacagcgcgccagagtaaccatacgcatccggatcgttctgggcgtgatgttcgagtttacgaatatccaccttgccgaccagcgccgaaatatcctggttgttttcatcgccgggttccgttttggcgatggcaatctgctccagaatggagggccagactttcaccacgcggaatttagtaatatcgccaccaaactcatgcaggcgtttggccgcccacggggacataatcgtaccgagatagcggcgcggaataccgtactctttttccagaatctgcgcgtcttcctgcggattaaacaggcataacggatgatcgttgaccggactacgctcgccgttggcgcttaaaacataaattggcacgcgctgcattagcgatttcagccgttcagcgagcgatgatttgcccccccccacaggtcccagcaaatagagaatttgcttcttctcttccagcccttgcgccgcatgttttagataagagacaatctgttcaatcgcgtcttccatgccgtaaaactcttcaaacgcaggatagcgagcaataacccggttggagaagagtcgggaaagtcggggttcctgggcagtgtcgaccatattaggctcgccgatagccattaatagccgctctgccgcgttggcataagcactgcgatcttgccgacaaatggtaagaaaatcctgcagtgtgaactcttcgtccttggcagcttcgtaacgctggcgatagtgatcgaatatattcatgatatgccatcctttcgttttttcgcacatgttaagagccgttcatatgaatagtagaggctcccggaagaggtagactgaacgccgtctctgctaaggaaaaaaaaagcaactctcatgccattttattggtcagaagattaacgtgtccggtgatacaccttcttaacattaagcgtagatggcatttgcaaaacttgcctgtacgcgtcagtggatttcgatgacatatcaataactcatcaggtagaaaaggctggtggatatcagaaaaagcgttcccggtcacataacgatcatcagccgatcatctgaaaataatcggttgtggtgatattaaacggttacattgtgtaaaatagttgggcttacaggtattggcggttacacttttgccgcagaacatttgaataaggaattatggattgtgaccaaacttaaacttctggctcttggcgtgtttattgcaacatccgccagcgtcgcgcacgctgaaagcaacctgacgttgggcgcaggcgttggtgtggttgaacacccttataaagattacgatagcgatgtttatccgataccggtcatcgcttatgaaagcgaaaacttctggttccgtggtctgggcggcgggtactacttgtggaatgacaatgccgataagttgtcaatcatggcatactggtccccgatgtacttcaaaccgggcgacagcgatgaccatcagttgcgtcgtctggacaggcgtaaaagtactatgatggcgggcgtttcttacgcgcatcacacccaatatggattcctgcgtacctcactggcaggggatacgttggataacagtaacggtattgtctgggatctggcctggctgtatcggtataccaatggcgggctgaccttaacgccaggtatcggggttgaatggaatagcgagaaccagaacgattactattacggcgtatcacgtaaagaatcttcgcgtagcggcctgcgcggctataacccgaacgatagctggaacccgtatcttgaacttagcgctaactataatttcgccggtaactggagcgtatatggtactgcgcgctacacccgcctgtcggatgaaattaccgacagcccgatggtggataaatcctggaccggtatcctttctactggcgtgacctatagattctgattgattgaatttgccggaaaaaccacgacaaagcctgcgttatgcgggctttgtgctgtctgaaacgcgaacatgacggcttgcataaatgcgctgttgaccgggtatggcgcagccttatgtgatttatactttgttacatcaatttaaaaaactagccttttatatgaaaaatccaggtgattacaactgcgctaacaattagcgtaataattgttgcaatgctggctgatatcgccctgtcacgtcccgcttatgctatacccattcttcacagcgagtaagacgaatgagcatagtattcaataccgtagccaagcccagcggcagtctgtgtaacttatcctgcaagtactgtttctatcttgataaaccccgggggcagcgcgtcatgtctgacgatgtgctggagacgtatatccgccgggtaattgatgatacgccatcctcagaggtctcgttttgctggcaggggggagagccgacgctatgcggtctttctttttaccaaaaagtggtgcgcttgcagcaacgctatgccaacggcaaaactatctacaacagtctgcaaaccaatggcgtattaatcaatgaagagtgggcggctttctttgcgcagcaccagttcctgattggtatatcgattgatgggccgcaagtcgttcatgataattaccggaaaacgccgtcagggcgggcgtctttttcccgagtcgttaatgctatccgccttctgcaggcaaatgatgtcgagttcaacacgctcactgtcgtgaatgatgcgtcatgctgtcatggcaacgctatttatcattttttgacgcaggaactggaaagtaaacacctgcaatttattcccattgttgagccgctcgcgcaaaaagcgcagcgttctttgacgttatctgacaatgaggattcgccttcgctgatgcccttttccgtcacgcctgaagggtggggcgcctttatgtgcgatgtttttgatcaatggatacgtcacgatgtcggacgcatattcgtacagctttttgataacttacttggcgtctggatgggggagcccgccacgctttgtacgatgcagtcgacctgcggacaaagtttgctggtggagcagaatggcgacgtgtttagctgcgaccattttgtttttcccgcctataaactgggcaatctgcagcaacactctttagaagaaatggcggcctctccttttcagcagcagtttggcgcggctaaagcaaacctttcctcacgctgccagaactgtacgtggcgctttgcctgtcacggcggttgtccgaaacatcgaatttgtatggacggcggcgaacggcaaaattatctctgtaaaggatatctggagttctttcaacatgtgacgccctatatgaatgtgatgcgtcaattattactgaatcagcgacccgccgcgcatattacccgcatcgtcgacatgattgcggatgacgttcgtcagtgacaagaaaatcgcccccttgcgcggtatgatgccggacattaccgtagggtctaagagtcctgtattgttttaccgtcgagtgacattgaaaaggaaatgaaatcagtgaaaaacgtaacgttttgcgggcaggtgacgcttcctgccatcggacagggaacatggtatatgggcgagcgcgcggatcaacgtcagcgcgaggtttcggcgttgcgcgcggggctggatttggggttacgccttattgatacagcggaaatgtatgccgacggcggggcggaaaaggtcgtgggcgaggcgttagcagggcgacgcgatgaggcatttctggtgtcaaaagtgtacccgtggaacgctggcggccagaagatagttgccgcctgtgaagaaagcctgcgtcgtctgaaaacagattatctcgatctctatctattgcactgggccggaagcttttcattcgaagagaccgttgaaggtatggagcggctaatcgcgcaggggaaaattcgccgttggggagtctctaatcttgattatgacgatatgcaggcgctgtggcgcatccctgggggacagcaatgcgcgacaaatcaggtgctctatcatctggcgtcacgtggtattgagtatgatttattgccgtggtgtcaacaacagcgaatgccagtgatggcctatagcccgctggcgcaggctggccggttacgtagcggtttactgaatcatccggtggtgaatgaaattgcgcaagcgcataacgctacggcggcgcaaatcttactgacgtgggtgattgcgcatccgggcgtgatggcgatcccgaaagccggaagtacagaacacgtgaagcaaaatgcggcggcgcttgagatcgccttgtcagcaaacgaacttgccttactggacaacgcctggcctgcgccaaaagggaaaaccgcgttggatatggtgtgacgccggataaaatgtgtaagcgccgccatccggcaggtcatgcctgatggcggctgacgcctttcagatcctatagtaacgccgttatccattcacttttagcgtttagcgacgcagatagtctgcgccagacgagagggtttttcttctgtggcttgttgcggcgcagtagcgtaaaccgtttcaacgcagacaaacgttttatagccgtcatccggcatgtcgcccatgctgacggacaacgccgggccagggttccagcctacgacgttaaggtgatggtggtggaccacatcaatcgtgcggtttaatgtcgcatcgtggatcacgctacatgcttcaggattgaggtaaacgcgatcggtacggtccggaaaggtttgtataccgtcggtcaggacaccttctttagcgtcgttaactttatcaataaaccgatcgccgagtccgctgaccttaacgttggcgatgtcgccaacgttaaaatagctgtggagcgcggatgtggttgcaaattcgccatgcgcttccagttcaatttcacaggttttacccactttaaaacgtgccagcagcgtgaaatcgtgcggccagtatttccgggtggcctcactgctttgcagctcaaatgtcagcattacgccattatcatcttcattatgcgcttttagcgcccacggaagattacgcgcaaagccgtgtgacggcagaccctgttgagccgcaggtccaaaccagggccagcagatcggtacaccgccgcgtagcgccacgccggttttgaaaggcgtattattactgagccacaatacctcttcctcgccaacgggtttccaggagagaaggtgcgcgccctgtaatgcaaaagaggctttaacctgcggatggtcaacgacgatcagatccaggtcatcaagctgacgacgggaaaggacaggggtaagctgttcgataaccgggagggcaaaaattttattaatcattacgcaatcctcttaaccctaaataattcgagttgcatgacaaggcgcttgtgccttgaccagtgcttgcgctggcccgtagaggcgaggccgcaggccgagtaacgcggcaagtgaacgacaaattcatcgggaacgaatttgaacaaccgtaggtaatctccggccagggacatggacatccctgattcatcccgataagttcgacttccgtcagtgattcgggtgagaaagcatagccaacacacctgcaacttgaagtatgacgggtatatctttaagcaaaaaaaagagcgacctgagtcgctcttaccaatgactgtgtcatctcaacttatttggagatgtgagcaatcaggtccagtactttgttggagtaaccggtttcgttatcgtaccaggagaccagtttcacgaagttgtcgttcagcgcgatgcctgctttagcatcgaacacggaagtgcatacttcaccgttgaaatcggtagatacaacgtcgtcttcggtgtaacccagcacgcctttcatttcgccttcggcagcagctttaacagcagctttgatctgctcgtaggtagccgctttttccagacgaacggtcaggtcaacaacggatacgttcggagtaggaacgcggaacgccataccagtcagtttgccattcagttccggcagtactttacctaccgctttagcagcgccagtagaggacgggatgatgttctgagatgcgccgcggccgccgcgccagtctttgtgagacgggccgtcaacggttttctgggttgcggtagtcgcgtgaacagtagtcatcagaccttcgatgatgccgaagttgtcgttgataactttagccagcggcgccaggcagttggtggtgcaggaagcgttggaaacgatgtcctggccttcgtatttgtcaaagttagcgcctttaacaaacattggggtgttgtctttagacggacccgtcagaaccacttttttcgcgccagcggtgatgtgtttacgcgcggtttcgtcagtcaggaagataccggtagcttcagccactacgtcaacaccaacttcgtcccatttcaggttagccggatcgcgttcagcggtaacacggatttttttaccgttaacgatcagatgaccgtctttcacttcaacagtaccgtcgaaacggccgtgagtggagtcatatttcagcatgtatgccatgtactctgcgtctaacaggtcgttgattgcaacgatctcgatgtcagaacgtttctgagcagcacggaaaacaatgcgaccgatacggccaaaaccgttgatacctactttgatagtcatatattccaccagctatttgttagtgaataaaaggttgcctgtaaaattacaaaaaccttacgcagcgtcaagcggaatcgtgtcaatcattgcgacaaatcaatcctctgcacaacctttgcgcggctgattcgcctcactcttcctttcggcttgaaaccacatgggggcgccgccccgaattttaaagggcaaccgagataataatgtgacatcagtcacgattcgtgagccgccatttcgcaatgatcaagtttagaacaaaagttggtactgaggtgttaatgttttgttagaatcggtcaggcaatgtgagcacgtttaaagtgagatgtgagcaaatggctaaccaaccttcagcagaagaactcaagaaaaaattgtccgaaatgcaattctacgtgacgcaggatcgtggcacagaaccgccatttaccggacgcctgctacataataaacgcgatggggtttatcactgcctggtctgtgatacgccgctttttcactcccacaccaaatacgattcaggctgcggctggcctagcttttaccagcctgtcagcgaagaggcgattcgttacatagacgatttttctcatggaatgcagcgtgtcgaaattcgttgcggtaactgcgatgcgcatctcggacacgttttcccggacgggccgcagccaaccggtgagcgctattgcgttaactcggcctcgctggccttttctgacgagaaaaacggcgatcaactgaaaggctgaaaaaacgattcagcaaattattccacaggagcggacacatcatgaatcttgatgagatcattaacagcatgacgccggaagtgtatcaacgtttatccaccgccgttgagctgggtaaatggccggatggcgtggcgttgacgccggaacagaaagaaaacagcctgcaactggtgatgctatggcaggcgcggcacaataccgaagcgcaacatatgacgatcgatactcacggtcagatggtgatgaaaagcaagcagcagctcaaagcggatttcggtattacgtcaaagccgattgcgacattgaaaatgcagtaacggcagccggataagaggtagccgccatccggcggtttcattgccaatgcgttgtgcttaccgggcctgctcattgctgtcaggcacaggcccgccatattttacccattaacgcttaatgtccagcgagtccgccaactgtttcgctaactgattattgtcatcggtgccttattcccagaacattgcgccagccagcccgcgctttttaatctgttttgttagaagcgctctccagcctgcgttgagctttgcctggtagcgacgctgacgtgacgtatccggcccaaagatctatgcaatggtctcaccgttgcgtgatgtattgaccggatacgatacctgctccgctacctggcgacagcctggccctgcgtctcttcccagtctgccagcgtatacagcgtcgcgcctgccgacgccatctccataaacgcgtgcgcgctatcctgcgggtgaatattcacgccgcgacagccatcggtgataacgttaacggcatagcccaactctagcgcatccagcaccgtaaattttacgcagtaatcggtcgccaaccccatcacgataagctcggtaacgtcatgctcgcgaagccaggtatcaagggtagttttctgccgatgttcgttgtcaaaaaacgcactgtagctatcaatcagcgggttttcacccttatagatgcaggcgtcaatcgcatgttggttaagcaggggatgtaacgccgcgccgtcggtatgttgaacgcagtgatccggccagagcgtttgcggcagcccgtccagctttccctgactatagggttccgcctgatgctggctggcgaagctgccatgctgcgcgggatgccagtcctggctggccagcaccggaatctgccggggctggcaccagtcaataagagcgttggcgatgtcgatggtgctgtcgccttccgctacagccagcgcgccgccggcgcaaaaatcattttgcaagtcgaccagtaataaggcccggtttgtcattatcttctccttgtcgtcgggattttttaatcatccggcgtcaattcaccacgcaagttttgcgccatcgcgctacgaatcgcctgagtgtccagaccctggcttaacaaataatgcagtttggttaaggtggcttcgacggtcatatcggcaccgccaatcacgccagcgtgcgccagcgcattaccggtagcgtacccgcccatattgactcgccctgacatgcattgcgtcaggttaaccaccacgatgccgcgcgaactggcctctttcagctcctgtaaaaacgctttattttgcggcgcgttgcctacgccataagagcgcagaatcagcgcttttaccggctgacgcagaaagttacgtactacctcggcggaaatccccggataaatcgtcactacgcctatcggctgcggcgtaatagggtgaacgattaattcaccagaaccgtagggcgcgggaggcgtatttaaacggcgaatgtgaattcctgcttccagcaagggcggcagattgggagaggcaaaagcgtcaaacccatccgcatgggctttggtcgtgcgattaccgcggaacagacgattattaaaaaacagcgttacttcattaatagggtagttggcggcgacataaagcgcattcagcaaattaatttgcccgtcggagcgcagctcagccagcggaatttgtgaccctgtcacaatgaccggtttacccagattttccagcatgaaagagagcgccgatgcggtaaacgccatcgtgtcggtgccgtgcagaataacaaaaccgtcatactcatcgtagtgcgctttgatatctgcagcgatatgctgccagtcttccggcgtcatatctgatgaatccatcagcggggcatattcatggatggtaaaatccggcatctccgggcggtggaattccggcatcagcgccagctggcgctgaaggtgcccggacaccgggatataccctttatctgagcgctgcataccgatagtaccgccggtataggcaacgtaaattgatttcttttgcatgataatgttcagtcgtgtcgcgaaggacgtattaatgattatcggatggcggctatgagcagacgccgccatccggtatggctattgatgaagcattagcgaacgttcgcgcaagtcaaacagaacgcataacggttttgcggatcgttaaatgccgccagtttatccccctcggccttcaccgtgttggcggcggaaacgagcggcgccgggagcatcgcctgaatggtctccggcagcatggcgcgtactgatccggtcatactgtccatgaccatatcaaggaccgtcggttcgtcctgatagtaatcaagatgccactgtttcagtttcgccagctccgccgctttggcgacggcgtcgtcaaagtcgccgagactgtccaccagaccattggctttcgcgtcttctccggtccagacatggccttgtgcgattttatcaatttgctccggcgtacgcttacgcgcgtctgccaccagcgtgataaagcgtttgtagccgtactcaatactgagttgcatcatctgctgcacttccggtgacagcgctttggtcatcgaaatatccgccagcggcgaggtggaaacgccgtcgctgtgtacgccaatcgacgacaggctgttttctaccgtattgatgacgccgaagatgccaattgaacccgtcagcgtgctggggctggccacgatatagtttgccggcgtagagatccagtaaccgccggaggccgccataccgcccattgagaccaccaccggtttgccagccgctcttgccgccgccagttcggcgcggataacttcggaggcgttgacgctaccgcctgggctattgacgcgcagcacaatcgctttcactttaggatcaaggcgtgcgtcgcggatctgcgatgccgtagtgtcgccgccgacattccctggcgtttcttcgccatccataatcgcgccattggcgaaaataaccgcaatagtaccgccggtatccgcaggcgttttcagcgaataatcgtaatagctgatcgcgcgatagttattttcggttttgctccagccaaactgcttcgtcagcgctttttcaacatctgcgctggaggcgagggcgtccaccagtttatggtcgagcgcatatttggcggtgtcgccgcccacgctggttaacccgtcgataatagcctgcgcgccggggaagagttgttgcggcgaaatctggcgattggcggaaacggtatgcaggtagttctgccacagttcgcctatccagcggctgtcggcctcgcgggcggcgggcgacatatcgtcgcggataaacggctcgacggcggatttataggtgccgacccggaaaacgtgggtagagactttcagtttatccagcagcgttttgtagtacaggccattcgtagcgaagccgtgaagatctacctgaccctgtggggaaagccaaattttattagcgaaactggcgagataatactgaccctggctgtagttttcacccacggcgaaaaccggtttgccgctgtcgcggaattcgcgcagcgctttaccgatatagcgcattgatggctgatcggcgccggtgaagtttttcagatccagaacgatacccgtgatattacggtcatctttcgcctgacgaatagcgttgacgatgtcaaacagggagttttcctgcagacggtcggagctggcgccaaataactggcgacccagcgcgcccagacgatgattggtggagggtttatccacaatgacgccggaaatatccagcagcagagcgccgcgcgcggtttgctcactgttgctgccgttaccgatctgcatccagatcccaacgcccaccaggaccagaaaaataaagaacaggttgagtaccatttcacggacgaagttcaacactcgccacgtccatttaaaaaatccggcaataaatcgccacagggttcgcatgtattctccctatctgagtaacaacgcttgtaccttggtgaggataaagcattaagatgtggctatcgtaatgacccatcaggcagttgtcagcaggaatcactgcctgcgctgtaacaaaatccgctcccgtgttaattttgtgaataaatatcattgctggagttaatcaaatggatgcactagaactgctggtcaaccgtcgtagcgcctctcgtctcgcagaaccggcgcctgtcggagagcaattacagaacattctgcgggcgggaatgcgtgttcccgatcataaatctctacagccgtggcgtttttttgtgattgaaggagaggggcgcgaccgcttcagcgccgtacttgaacaaggcgctgtcgctgccgggggggatgagaaggcgatcgaaaaagcgcgtaatgcgccgtttcgcgcaccgctgattattaccgtggtggcgaaatgcgaagaaaaccataaggttccggtgtgggaacaggagatgtctgccggatgcgcggtgatggcgatgcaaatggcggcgattgcgcaagggtttaatggtatctggcgtagcggcgcattaacggagagcgctattgtgcgggaagcctttgagtgccgcccgcaggataaaattgttggttttctctatctcggcacgccgcagctcaaagcgtcaacgacgatcagtacccccgaccccacgccgtttgtgcgttatttctgacgctgagggataaaactgtctggattctgagcaaaggcgcggtaattcagacagtgatacttaccacatcagggaatgagcgctaccatagcgcgaatgcaatgacaggagatgtccatgagcgagcaagccattcgtttaacgcaatacagccacggcgctggttgcggttgtaaaatttcccctaaagtgctggagactatcctgcatagcgagcaggcgaagttcgtcgacccgaacctgctggtgggtaatgaaacccgcgatgatgcggcggtttacgatctgggtaatggcaccagtattatcagcaccaccgacttctttatgccgatagtcgacaacccgtttgattttggccgcattgcggcaacaaacgccatcagcgatatttttgcgatgggcggcaaaccgattatggcgatcgcgatccttggctggccgattaataccctgtcgcccgatattgcgcgtgaagtgaccgagggggggcgttttgcctgccgtcaggccggtatcgcgctggcgggcggacactctattgacgccccggagccgatctttggtctcgcggtcacaggcgtagtgccgaccgaacgggtgaagaaaaacagtaccgcgcaggcgggatgcaaactctttctgaccaaaccgttggggattggcgtgttgaccaccgccgagaaaaaatcgctgcttaaacctgaacatcaggggctggcgacggaagtcatgtgtcggatgaacgttgctggcgcggcgtttgccaatatcgacggcgtaaaagctatgactgacgttaccggttttggcctgctggggcacctgagcgagatgtgccagggcgcaggcgtgcaggcgctgctttgctatcaggacatccctaaactgccgggcgtggaagagtatattgctctgggcgccgtaccgggcggcacagagcgcaacttcgccagctatggtcatctgatgggcgacatgtcgcgtgaagttcgtagcctgctgtgcgatccgcaaacgtcaggcggtctgctgttggcggtaacgccggacgccgaagacgatgttaaagccaccgcggcggaatttggtatcgatctgaccgcgattggcgaactggtcgaggcccgcggcggtcgcgctatggttgagattcgttaacctgatgcggttgtttattgccgaaaaaccgagtctggggcgcgccattgcggatgtgctgccaaaaccgcaccgtaaaggcgatggttttattgagtgcggaaacgggcaggtcgtcacctggtgtattggtcatttgctggaacaggcgcagccggatgcgtatgacagccgttatgcgcgctggaatctggctgacctgcctatcgtgccggaaaaatggcagcttcagcctcgtccttccgtcaccaaacagctcaatgtgattaagcgctttttgcatcaagccggtgaaattattcacgccggcgacccggatcgcgaagggcagcttctggttgatgaagtgctggattatctccagcttcctgccgaaaagcgccagcaggtgcggcgttgtctgataaacgaccttaacccgcaggcggtcgagcgtgctattgacaggctgcgggcgaacagcgacttcgtgccgctgtgcgtatccgcgctggcgcgagcgcgagcggactggctgtatggcattaatatgacccgcgcttacacgatcctgggccggaatgccggctatcagggcgtgttatccgtgggacgcgtgcagacgccggtactggggctggtggtgcggcgagacgaagagattgagaacttcgtcgccaaagacttctttgaagtgaaggcgcacatcgttacgcctgccgacgagcgttttaccgctatctggcagccgagcgaggcgtgcgaaccttatcaggatgaagaggggcgcttgcttcatcgtccgctggcggagcatgtagtgaaccgaatcaacggtcagcccgcgctggtaaccagttataatgataaacgggaatcagaatccgcgccgctgccgttttcgctctcgacgctacagattgaagccgccaaacgctttggcctgagcgcgcaaaacgtgcttgatatttgtcagaagctatatgaaacccacaaactgattacctatccgcgttccgactgccgttatctgccggaagaacactttgccggacggcaggcggtcatgaacgcgattagcgtccacgccccggatttactgccgcagcctgtggttaatcctgatacgcgcaatcgctgctgggatgacaaaaaagtggatgcgcaccacgcgattatcccgacggcgcgcagttcttctgtccatttgacggaaaacgaagcgaaagtgtacaccctgattgcgcgtcagtatctgatgcagttctgcccggacgcggtgtttcgtaaatgcgttattgaactggaaatcgccaaagggaaatttgtcgccaaagcgcgttttctggcggaagccggttggcggacgttactgggcagtaaagagcgcgacgaggaaaacgacggtacgccgctgccggttgtcgccaaaggtgatgagttgctgtgtgaaaagggggaagtggtcgaacgccaaacccagccgccgcgtcatttcactgatgcgacattgctttccgcgatgaccggaattgcccgcttcgtgcaggataaagatctgaaaaagatcctgcgcgcgaccgatgggctggggacggaagccacgcgcgccgggattatcgagctgctgttcaaacgtagctttctgaccaaaaaaggtcgctacattcattctaccgatgctggcaaagcgttaatacattcgctgccggagatggcggcccgtccagatatgaccgcgcactgggaatctgttttgacgcaaatcagcgaaaagcagtgccgttaccaggatttcatgcaaccgctggtcggcacgttatatcagctgatcgagcaggctaagcgcacgccggtgaagcgcttcagagggatagtcgcgccaggcggtggagacaagaaaaagagcgcgccgcgtaagcgagcgggcaaaaaaagcccgcctgctgcggagacaggccgtcagaccgaataagcgtaaagctatctggcctgacgacgggattaaatgacgccctgcgccagcatggcgtcggcgactttcacgaaaccggcgatgttggcgccctgaacgtagttggtatgcttattgtcgccgccgtattcgacacaggcgtggtggatatccagcataatgtgatgcagacgggcgtccactttctcggctttccagctcaaccgcgcggcgttctgcgccatttccagccccgatgtcgccacgccgcccgcgttggcggctttacccggcgcaaacagtacgcccgcttcaaggaagagatcggtcgcttcaatcgtggttggcatatttgccccttccgccacggcttttacgccattggcaatcagtacgcgcgcggcgtcaacgtccagttcgttctgcgtcgcgcatggcagggcgatatccaccggtacgctccagggctgctggccttccagataggttaagccaaactcacgggcgtagtcagcgacgcgaccgtcacggctggctttaatttcacacagacgcgccagcttctctggcgtgaagccactttcatcgaccaccgtcccgctcgaatccgacgcggtaaccacgcgcgcgccaaaggccatcgctttctcaatggcgtattgcgctacgttgccggagccggacacggcgacgcgcatcccttcgaaaccgagaccatgacgtttaagcatcgcttcggtaaagtagaccaggccatagcccgtcgcctccgggcgaatcaggctgccgccgaaggaaagccctttgccggtgaagacgcaggagctgttattggaaagcttgcgcatcattcccgccataaagcccacttcgcgcccgcccacgccgatatccccggcaggcacgtcggtatccggccctaaatggcgatacagttcagtcatcagcgcctggcagaaacgcatcacttcgccttcgcttttccctttcggatcgaaatcgctgccgcctttaccgccgcccatcggcaacgtggtgagggcatttttaaaggtttgctcaaagccgaggaacttaaggatggaaaggtttaccgaaggatggaagcgcataccgcctttataggggccgatagcagagttgaactgcacgcgccaggcgcgatttacctgcacctggtttttgtcgtccagccacactacgcgaaactggattacgcgctctggttcaaccaaacgttccagtaaagacatgtggcggtaacgggggttttgttcaagaaacggccacagggtggtcatgacttcacggacggcttgcgcgaactcggtttgatgcgggtcgcgcttttgtacatggttgaggaacgattccagagaacatgtctgatccatagatataaaaacctcttatatattaatgtggttgtatttgcgttttatcagaatatgtatttgcagttttcgactataccatcagcaatgtgacggtaagcaagaaaaaaatgacgctgctaagtaaattcataacggggcgagggtcataactaaaagcgatgacaaaagaggattaaagttttcacggcggcttaccgttatactgagaatatacttagaaaaataaggaaatcctatgcgccgaagcctcgtggtcgccgtgatggcgataatgccaatggtcgggctggcaaaccagaacagtcgtcctgatattcaggtgaatgtcccgccggaagttttcagcacgcgcggtcagtcgtcccagccctgcattcagtgctgcgtttaccaggatcagaattactccgaaggcgcggtaataaaagtggaaggcgtcttgctccagtgccagcgtgacgaaaaaaccatcagcacgaatccgttagtctggcgtcgcgtaaagctataaacgcctgcaatagcggaatatccgccggggcgagggggtactccagcgcctcttccggcgtacaccaggctaatgcctgatgttccagcgcacgtatcagaccgttaaacgcaggcacatgccaggcgtgcaaatgaattcgtcggccagacacgtcgcgttgatggctggcgatatagacgccgggcgtggcgtcaatccctaactcttcgcgtagctcgcggataagcgcctgcggctgggtttcgccgggttcgactttaccgccggcaaactcccataaaccggcttgatccgcatgagctgggcgctgggccagcagaattttgccgtcgcattcaatgatggcggcaacaacatcgagtttttttatcattgtcgttaaggtcgttattcctgccgggaagcgtcgcgctatcccggccttacggttaatcagaaagcggaatcaaacacgaaacgtcgcccagaccggcgcatggtcggagggtttttccatactgcgaatgtcgtagtctataccggtttctgcgcaacgttccgccagcggagcgcttgccagcaagaggtcgatacgcagcccgcgattatccacgaaacctttcgagcggtaatcaaaccacgaaaatttatccatcgtttgcggattcgcctgacggaacgtgtccactaatccccacttcagtaaccgtgacatccattcacgctcctccggcaggaaggagcatttaccggtacgcagccagcgtttgcggttttcttcgccgatgccaatatccagatcggtcgggctgatattcatgtcgcccataattaataccggattatcgcacttgagttccgtttcaagatagttttgcaagttctgataaaactgcgctttcgcggggaacttcaacggatgatcccggctttccccctgcgggaaatagccgttaatgacggtgatattacccagcggcgaggggatttccgccatgataatgcggcgttgcgcctcttcgccatcatccgggaaaccgcgtctgacggaaatgggcgtggcttttgttagcagcgcgacgccgtaatggcccttttgtccatgatagaaaacgttatagcccagcttcgcgacctcttcgagcgggaacatttcgtcgtggacttttgtctcctgtagaccgatcacatcgggctggtgtttttcgacaatcgcttcaagctgatggggacgggcgcgcaggccgttgatattaaaagagacaaatttcatagtcactgccactttgcaaggtgaatcgtgttgggatggtaacagaaattttaccgggtgactgccactcatcgtcagattcggccaatggaagcgtatggtgttttctatagcgcgaaaatggcacggtttgcgtgcagatgcgccagaacggggcggtaatttccagtaaatttcgtataagatcacaattccagaattatatttggcaactgaataatatttcgctttttcctctttttagccaccgattatgcggaaatattcacttttcatgcagtaaaagtgaatatcgctacgctgtaacccattgatttaccgtttatcacctctgtttatgcaatgttaacgctggctggcacgaatgctgcaatctacatttacagcgcaaacactcatattaattaacatataaataactttatttttaccaaaagaggtcgctatgtctctgtcagttacgcgcgaaaactttgatgaatggatggtgccggtatacgttcccgcgccttttattcctgtacgcggagaaggctcacgcctgtgggatcagcaggggaaagagtatattgattttgctggtgggatcgcggtcaacgccttgggacatgcgcatccggcgctgcgcgaggcgttaaatgaacaggcgaatcgcttctggcatatcgggaacggttacaccaatgaaccggcgctgcgactggcgaaaaaactgatcgacgcgaccttcgccgaacgcgttttcttttgtaattcaggcgctgaagcaaatgaagctgcattaaaactggcgcgcaaatatgcccacgatcgtgtcggcaaccataaaagcggcattgtggcctttaaaaacgcgttccatggccgcacgctctttaccgtcagcgctggcggtcaacccacctattcacaggactttgcgccgctgccgccggatattcgtcatgcagcctataacgatctgaactccgccagcgcgctcattgatgacaatacctgcgccgtgatcgtagaaccggtgcagggcgagggcggcgtgatccccgccacgaaagcttttttgcaggggctgcgtgaattgtgcgaccggcatcaggcgttactgatttttgatgaggtgcagacgggcgtcggacgtaccggcgaactgtatgcatatatgcattatggcgttacgcccgatatcctgacgaccgctaaagcgttgggcggcggcttcccgatcggcgcgatgctgaccacgcaagactatgccagcgtcatgacgccaggcacgcatggcaccacctacggcggtaatccgctggcgacggcagttgccggaaaagtactggatatcatcaatacgccggagatgcaaaacggcgtcagacagcgccacgatgcgtttattgaacgtctaaatacccttaatgtgcgttttggcatgttcagtgaaattcgcgggctggggctactgcttggctgtgtgctacagacggagtttgccggaaaagccaaactcatcgcccaggaagcggcaaaagcaggcgtgatggtgctcattgccggtggcgacgtggtgcgttttgcgccagcgttaaatgtgagcgacgaggagatagccaccgggcttgatcgttttgccctggcgtgcgaacgccttcagacgggaggcgtaccatgcgggtgattcgtcctgtcgaacatgcggatatcgccgcgctgatgcagcttgcaggcaaaacgggcggcggcttaacctcgctaccggcaaatgaagcgacgctggcggcccgcattgaacgcgcgctaaaaacctggtccggcgagctgccaaaaggcgaacaagggtatgtattcgttctcgaggacagtgaaacgggtgaggtcggcgggatctgcgccattgaggtcgcggtcggccttaatgacccctggtataactatcgtgtcggtacgctggttcatgcctccaaagagctgaatgtatataacgcgttgccaacattattcctgagtaatgatcacactggcagcagtgagctttgcacgctgtttctcgatcccgaatggcgtaaagagggtaacggctacctgttgtcaaaatcgcgctttatgtttatggccgcgtttcgcgataaattcaatgagaaagtggtggcggaaatgcgcggcgtcattgacgagcacggttattctcccttctggcaaagtctcggcaaacgctttttttctatggatttcagccgggcggattttttatgcggtaccgggcaaaaagcgtttatcgccgagctgatgcccaaacatcctatttatacccacttcttatctgaagaggcacaggccgtgattggcgaagtccacccgcaaacggcgccagcccgcgcggtgctggaaaaggaaggctttcgctatcgccactatatcgacatcttcgacggtgggccgacgctggagtgtgatattgaccgggtgcgggctattcgtaaaagccgactggttgaagtcgcggaagggcaacccgcgcctggcgactatccggcatgtctggtcgccaatgaaaactatcaccactttcgggccgcgctggtgcgtgccgatccgcagacttcacgacttgtacttaccgcagcgcagttggatgcactgaaatgtcgcgcgggcgaccacgttcggctggtacgcctttgtgctgaggagaaaaccgtatgacgctatggataaacggcgactggataaccggtcagggcgaacgccgccgcaaaacgaacccggtgagcgcggagatactttggcaggggaatgacgctaatgcggcacaggtcgccgaggcctgtcaggcggcgcgcgcggcgtttcctcgctgggccagacagccttttgccgcacgacaggctatcgtagagaaatttgccgccctgctggaggcacataaagccgagctcacggaggtcatcgcacgtgaaaccggtaaaccgcgctgggaggcggcgacggaagtgacggcgatgatcaataagattgccatctcgattaaggcttaccacgccagaacaggcgcacaaaaaagcgaacttgtcgatggcgccgcgacgttgcgccatcgtcctcacggtgtgctggcggtattcggcccttataactttcccggccatttaccgaatggccatattgtgcccgcgttgctggcaggcaatacgctgatcttcaaacctagcgagctaacgccatggaccggggaaacggtaataaaactctgggaacgggcggggctaccggcaggcgttcttaatctggtgcagggcggccgggagaccggacaagcgctgagttcgctcgacgatctcgacggactgctgtttaccggcagcgccagtaccggatatcagcttcatcgccagctatccggccagccggaaaaaatcctggcccttgaaatgggcggaaacaacccgctcattattgaggatgcggcaaatatagatgcggcggtacatctgacgctgcaatcggcgtttattaccgccggacagcgctgtacctgcgcgcgacgccttctggtaaaacagggtgcgcagggagatgcatttctggcgcggctggttgacgtcgccggacgtctgcagcccggcagatgggacgacgatccgcagccgtttatcggcggactgatttcagcgcaggcggcacagcatgtgatggaggcctggcgtcaacgagaggcattaggcggtcgcacgctactggcgccgcggaaggtcaaagagggaacctctctgctgacgcctggcatcattgagctgacgggcgtcgcggatgtgccggatgaagaggtgtttggtccgctgctgaacgtctggcgttatgcgcatttcgatgaggcgattcgtctggcgaataatacccgttttggtctgtcgtgtgggctggtgtcgacggatcgcgcgcagttcgaacagctcttgctggaggcgcgggcagggatcgttaactggaataaaccgctcaccggggcagcgagtactgcgccgtttggtggtgtcggcgcgtctggtaaccatcggcccagcgcctggtatgccgccgattattgcgcctggccgatggccagtctggaatctcccgaactaacgttgcctgcgacattaagccccggcctcgacttttctcgcagggaggcggtatgacggcgcatgaagttaattttgacgggctggtggggcttacgcaccattatgccgggctatccttcggcaatgaggcatcgacccgccaccgttttcaggtgtcgaatcctcgtctggcggtaaaacaggggctgctaaagatgaaagctctggcggatgccggctttccccaggcggtgatcccgccgcatgagcgaccttttattccggcgttgcgtcagctcggcttcacgggtagcgatgagcagattctggataaggttgcgcgtcaggcgccacgctggctttccagcgtgagttccgcgtcgccaatgtgggttgcgaatgcggcgacggtttgcccatcggcagacgcgctggacgggaaagttcacctgacggtggcgaatttaaacaataaatttcatcgcgctcttgaggcgcctgttaccgaagcgctgctacgcgccatatttcgcgatgaaagccagttttcagtgcatagcgcgttaccgcaggtcgcattattgggagatgaaggcgcggcgaatcataaccgtcttggcggcgagtatggttcggcaggcgtgcagctttttgtctatgggcgcgaagaggagaatgaaatacgacccgctcgttatccggcgcgccagagccgcgaagccagcgaggccgtggcgcgtcttaatcaggtgaatccgcaacaggttatcttcgctcagcagaacccggaggtcatcgatcaaggcgtattccataatgatgtcatcgccgtttcgaatcgacaggtattgttttgtcacgaagcggcgtttgcccggcagaaagtgctcattaatcagttgcgtacgcgcgttgacggttttatggcgatagaggtgcccgccggcgaggtttctgtatcagatgctgtggcgacctacctgtttaatagtcagttgctaagccgtaacgacggctcaatgctgttagtgttgccgcgggaatgtcaggaccatgtcggcgtctggcgctatctgaataagctggtggcggaggataaccccatcagcgcgatgcaggtgtttgatttgcgagaaagtatggccaacggcggcggcccggcctgtctgcgattacgcgtggtgttaacagaagaagaacgaagggcggtgaatccagcggtaatgatgaatgacgctctgtttacggcccttaacgcgtgggcggatcgttattatcgcgatcgcctgaccgctgccgatctggccgatccgttattattgcgagaaggccgggaggcgctggatgtgttaacgcgtctgctggatttggggtcggtttatcctttccagcaaacgggggcggctgatggataactttctggcgttgacgctaagcggcacgacaccgcgggtgacgcaggggaagggcgcgggttttcgctggcgctggttaggccatggtctgcttgaactcacgcccgatgcgccggtcgaccgcgcgttaattctttctgcggggatacacggtaatgaaaccgcgccggtcgagatgctggataagctgctgtcggcgctgtattcaggcagcttgacgttaacgtggcgagtgctggtggtactcggcaatccgcaggcgctggcggcgggaatacgctattgtcacagcgatatgaaccgtatgtttggcgggcgttggcagtcctttgccgaaagcgatgaaacgcggcgggcgcgtgagctggagctaagtctggagaccttcttttcatctggccaggcgcgggtacgctggcatctggatctgcataccgccattcgtggctcgcatcatttgcgttttggcgtattgccgcagcgcgaccgcccgtgggagacagattttctggcgtggctgggcgcggcaggactagaggcgttggtatttcatcaggcgcccggcggtacgtttacgcactttagctctgaacatttcggcgcgctttcctgtacgctggagttgggaaaggcgttgccgtttaggcaaaacgatctgacgcagttcaacgtaacctcgcaggcgttgtcggcgttgctgagcggtgtcgaaacgtcaacctcgttttcgccgccgctacgctatcgggtggtgtcgcaaatcacgcgtcacagcgacaagttcgcgctttatatggatgcgcaaacgctgaattttactgcctttgcgaagggaacgttgctggccgaggagggggataagcgcgtgacggtgacgcatgacgttgaatatgttctctttcctaatccctctgtcgcctgcggattgcgggctggattaatgctggaaagactgccctgataaatgtccctgtaagctcacgttaggattacagggatgatttgggacacagtttcatgctattacggattattcctggagaattgctttattaataagcgttgctgcgttatagttctgcataatttctgctatatcatgctgttgtatatttctctttcaactctgcgcaatttattctttttttcttcacaattggcgaaaaagtgttttttatactttcattgttttaccgttgttatgactaattgacgctaagacggttaaagttaatcacgacaacacggcgctgttttaaatatgccgtaaaaataactgaaaggaaggatagaaatatgcgtaaactgactgctctatttgttgcctctaccctggcgatgggtgctgcgaatctcgctcatgccgctgagactaccaccgccgcgccagcggatgcgaagccaatgatgcagcataaaggtaaatttggcccacatcacgatatgatgtttaaaaacctgaacctgacggacgcacagaagcaacaaattcgcgacattatgaaagcgcagcgcgagcaaatgaaacgtccgctgctggaagagcgtcgcgccatgcatgatattatcgccagcgataccttcgataaagccaaagccgaagcgcaaattacgaaaatggaagcgcagcgcaaggccaatatgctggcgcatatggaaacccagaataaaatttataacgttctgacgccggagcagaaaaagcaatataacgctaattttgagaagcgtctgacggaacgcccggcgcaagaaggtaaaatgcctgctgcggcagaataactttccgcataatttaagaccgccggtcttgtcgacaacacaatcgttgaggtggacaggatcggcggttttctttatgactggcgacagtcggtgtgcagttcaatgatctcatattgacctgacattaacggtttacagagaatcttatagccgtcctgatcaaaacccgcaggtgtgcgcaccagggtggcggcctcatccagcgagggtaccgcccccagccataaccaattgttgataatgtggaactgggtcatttgtgggcggctctcttttaacgcgatagcgcctttccagggccagcaaaccacacgtaaccgttccagcgaggcctgcagacgaagaaaatgcgcctgcggggtttcttgcccacaacacgcgccagcgcagcgcttcagagcgaaacgaaaacaggcgcgcccacggcttaccggttcaagccccagcaggccataacacaatttttgttcatcggcgaggttctgtaagctttgcagcgccgcccgacggttggcgaagaggccaaacaggtttggctcatgggaaaaatcgacgctgcgggcggaaacgacctcaatcttttgttcgctcaactggagagagcaaagctggcgattacgccgtaaccgcttgttaaacagcggctgttgttctttgatcagccgcgcctccagcagcaacgcgcccatttccccagcggtgcagatccagcttatccgccgcgcctgtcgcagcatagtggcctcgtcaggcgttcgcagatgtgaaagcacccggctgcgaatattcacgcttttaccgatataaagcggcagcgtatcgctttcgctatgaaatatatagacgcccggtaaggctggcgcttcgctgaggaaaggacgtaaatgttctggatattcgtaaatggccgccgcttcaaactcaaggcggggggctgattgacgccgtaccacagtgatctccgttaactggttattcatccagtataacagcggatgggtgattaaaaaagaggctgggaagagaggaggccggatagacgagcgatatccggcacaacagtagaagtacgcttaccttttccaaaagtcgtcgaataccgtaatcggtaaacggcgcttatgttcagtttttacataccagccttcgatagttttagcgatggcggggtccagcgttttgccttccaggtaatcgtcaatattgtcatacgttacgcccagcgcggcttcatcaggcagtgaagggcggtcgtcttccaaatcggcggtggggacttttttatacagatgctcaggacagcccagcgctgcgagaagctgtttgccctggcgtttgttaaggcgatgaagcgggttaatatcggtaccgccgtcgccatatttggtgaagaacccggttatcgcttccgccgcatggtcggtgcccaccacgacgccgtgagtcataccggcgatgctatattgcgctttcattcgctcacgcgctttttcattgccgcgaacaaaatcgctcagctcaattcccgcttcgcgcagcgcctgttcgctggcgaggacggcgcctttaatattgacggtgagtactctgtccggctgaataaaagcaatggcgtcctggcaatcctgttcatcagcctgtacgccataaggcagacgaacggcgataaactgcagcgcattatcaccggtctcttctcgcaattcggcgatagccatctggctgagtttcccggccagcgtcgaatcctgcccgccgctgatgcctaacaccagcgatttcaaaaagggataggttttcaggtacgctttaagaaaatccacgctgcggcgaatttcttcttcagggttgatatgcggtttcgcgccaagcgcctggattatctcttgctgcagagtcatttaacccccttcgacattaaaaaaatgaatctttaccctgttaaagctaacccttcgccgctgaaacaacaaggtttggcgggctaagcggtgtttaaaacaacatgtcgctgcgttagagaattttccgaaagactttttgtggcgaggcgcggcttgaaaaatgttctgatgtattccaggcttacataacacgctgataaacaagaggacggaaaatgaacaagaacgtagcaggaattttaagcgcagcggcggtaatgactatgctggcaggttgtacggcgtatgatcgtacaaaagaccaatttgttgagcctgtcgttaaagatgttaaaaaaggaatgagcagggcgcaagttgcgcagattgcgggcaaaccgtcatctgaagtgagtatgattcatgcgcgcggtacctgtcagacctacatcctgggtcaacgtgatggtaaagcggaaacctactttgttgcgctggatgataccgggcacgtgattaactccggctaccagacctgtgcggagtacgacactgacccacaggcgccgaagcagtaacaactgtacattgcctgaacattcaaggaaaccggcctgcgagccggtttttttgtgcctgccataaccttatttattatcgcgaattatttgcccgaaatgtgaggggggtcataacgccaggtcaatgagagacaatttagtgggtcaaggaaataccatccggtggtccgatcccgtatactcatttcagccacctaaaaaagtaaatccggttacgcaagtcgcccagagtatggatgcaggttgaggcttgcggcgtatctggttgacagataatcgcacatgaggaaggtttttatggaaaagaaacacatttatctgttttgttctgcgggcatgtcaacatcgttactggtatcaaaaatgcgcgctcaggctgaaaaatatgaagtgccggtgattattgaagcattccctgaaaccctggccggtgaaaaaggcccggcagcggacgtcgtgttattaggcccgcaaattgcttatatgctccccgaaattcagcgtttattacctggtaaaccggtagaagtcattgattcaatgttgtacggcaaggtagatggcttaggcgtgcttaaagctgcggtagcggcaattaaaaaagccgccgcgaattaattattttttaatttttcccgtcaaagagttatttcatacactaaccgcaatattttattgcggtatttaagggtatttttctatgagtaacgttattgcttcacttgaaaaggtactccttccttttgctgtaaaaataggaaagcagccacacgttaatgcaatcaagaacggctttattcgtttaatgccattaacccttgcgggggcgatgtttgtattaattaataacgttttcctgagctttggggaggggtcgtttttttattccatgggcattcggcttgatgcctcaaccattgaaacacttaatggattgaaaggcatcggcgggaacgtctataacggcacattgggcattatgtcgctcatggcgccattttttatcggcatggcgctggcggaagagcgcaaggttgatgcgctggccgccggattgctttccgtggcggcatttatgaccgtaacgccgtatagtgtcggcgaggcctatgccgtaggcgctaactggctgggtggtgcaaatattatctccggtattattattggcctggtggtcgcggagatgtttacatttattgtccggcgcaactgggtgattaagctaccggacagcgtaccggcttcggtgtctcgttcattctcagcattaattcccggctttattattctctctattatggggattatttcctgggcgctgtctaattacggttctaacttccatcagattattatggacactatctctacgccgctggcatcgctgggtagcgtggtagggtgggcatatgtcatttttgtaccgctgctgtggttctttggtattcatggttcgctggcgctgaccgcgctggacagcggcatcatgacgccctgggcgctggaaaacatctctatttaccagcagtatggctccgtcgatgcggcgctggaagccggtaaaacgttccatatctgggcgaaaccgatgctggattcttatatcttcctcggtggtagcggcgcaacgctgggtctgatcatcgctatcttcctggcatcccgtcgcgcggactatcgccaggtggcaaaactggcgctgccgtcaggtatcttccagattaacgaacccatcctgtttggcctgccgattattatgaacccggtgatgtttatccccttcattctggttcagccgattctggcggcgattacgctggtggcttactatttgggtattattccgccgattaccaatattgcgccgtggaccatgccaaccgggttgggggcgttctttaacaccaacggcagtgtcgccgcgttgctggttgcgctatttaacctggcggtcgctaccctgatttatctccccttcgtggtggtggctaacaaagcgcagaacgccatcgagcaggaagaaagcgaagaagatatcgctaacgcactgaaattctaaactccgcgccggcatgggatgccatgccgggctgaatcagaggaaagactatgtttgatcttgaaaatgttgtagataaccagaccgcggctgaggaactcgaagaagtcgttatggggcttatcatcaattctggtcaggcgcgcagcctggcatatggcgcgctcagaaaagcgaaagaaggcgattttgaggcggcgaaagcgatgatggaccagtcgcgcatagcgctcaatgaagcgcatcttgtgcagacaaaactcatcgaaggcgatcagggcgaaggcaaaatgaaagtcagtctggtcctggttcacgctcaggatcatttgatgacatcaatgctggctcgtgaactgatcgccgagttgattgagctccatgagaaactgaaataacagggggcggatgatgcagctacaggttaacgcaacggaaatcaaaacggtttatgagcagcagctcttcaatggcaaaaatttccatgtgtttatctataacaagacggaaagcgtcaccgggctgcatcagcacgactactatgaatttaccctggtattaaccggacgttattaccaggagattaacgggaagcgtgtgctgctggaacgtggagattttgtttttatcccggtggggtcgaatcaccaaagtttctatgagtttggcgcaacgcgtattctgaacgtaggaattagtaaacgtttttttgaacagcattatcttccgttactgccgttttgttttgtggcatcgcaggtatacagggcgaatagcactttccttacctatattgaaacggtgattgcgtcgttgaattttcgcggcaatgggctcgacgaatttatcgaagtggtgacattttatattataaaccgcttacgtcattaccgcgaagagcaggtttatgatgatattccacaatggctgaaagcaaccgtggagataatgcatgataaaacgcagtttggcgaacatgcgctggaaaatatggtgcgcctgtcggcaaaatcccaggagtatctgacgcgcgccacccgacgttattacagcaaaacgccgatgcaaatcattaatgagattcgcattaattttgccaagaaacagttggaaatgaccaactattcggttacggatattgcttatgaagccgggtatagcagtccaagtctgtttattaaaacgtttaagaagatgacctcatttacgccgaatagttatcggaagcgattgacggaaattaatgagtaacggtttgcattgctcgattaattacatttcacgcttgccccaatagcgcggggaacgtcacgctatttcttacgagcgggcatagcgtaatacatatcagtgttatacactgaagggagatattatgagccagaaattaaaagtcgtcactattggtggcgggagcagctacacccctgaattacttgaaggctttattaagcgctaccatgaattacctgtcaccgaattatggctggttgacgttgaagacgggaaagagaagctgggcattatttatgatctctgccagcgaatgattgataaagcaggcgttccgctaaaattgtataaaacgctggatcgccgggaagcgctgaaaggcgctaattttgtcactacccagctacgcgttggtcaactcaaagcccgtgagctggacgagcgtatcccgcttagccacggctatctggggcaagaaaccaacggcgctggcggtttatttaaagggttgcgtaccattccggttatttttgacatcattaaggatgttgaagaattatgtccgaatgcgtgggtcattaactttactaacccggcggggatggtgacggaagcggtttatcgtcataccaactttaaaaaattcatcggcgtatgtaatattcctgtcggcatgaaaatgtttattcatgacgtgctggcgctgaatgagaatgacgatctttccattgacctgtttggtctaaaccatatggtctttattaaagatgtgctggtgaatggcacctcacggttcgcagaattactggatggcgtggcgtccggtcagttgaaagcgtcaaccgtaaaaaatatctttgatctgccgtttagtgaaggattgattcgctcgctgaacatgctgccgtgctcttatttgttgtattacttcaagcaaaaagagatgttggcgattgaaatgggcgaatattacaaaggcggcgcgcgcgctcaggtcgtacagaaagtggagaaacaactcttcgacttgtacaaaaatcctgagctaaacgtgaagccgaaagagcttgagcaacgcggcggcgcttattattccgatgccgcttgtgaagtcattaacgctatttataatgacaagcagactgagcattacgttaatattccacatcatgggcatgtcgagaatatcccggcggactgggcggtggaaatgacctgcattctgggacgcaatggcgcgacgccgcacccgcgtatcacccgttttgacgaaaaagtgctggggcttatccacactattaaaggatttgaggtcgcggccagcaatgcggcgctgagcggaaactttaatgatgttctgctggcgcttaacctgagtccgctggtgcattccgaccgcgacgcagaagtcctggcgcgtgaactcattctggcgcatgaaaaatggctgcctaattttgccgcttgcatcgaagcgcttaaaggtaagcaccactgacagaggtaggctatggaacgcgtgttgattgtgaatgccgatgattttggcctgagtaaagggcaaaattacggcattgttgaagcatatcgcaacggcgttgtgacctccacgacggcgctggtcaatggcgaggctattgaccatgcggcgcagcttagccgcgagctgcctgcgcttggggtgggaatgcattttgttttgacgttaggcaaaccggtgtcagagatgccgggcctgacgcgagacggcctgttggggaaatggatctggcaaatggcggaggaggatacgcttccgctggatgaaattgcgcatgaactggcgtgtcagtatcagcgtttcatcgacgtatttggcagcgagccaacgcatctcgacagtcaccatcatgtgcatatgttcccgcaaattttccccatcgtcgcccgctttgcggcgcagcgcgggattgcgttacgtattgaccgccagacggtgttgaacgccgacgatctgccgtcggatttgcgcagcactcaaggatttagtagtgaattttacggcgaggagatcaccgaagcgtgctttttacgcattctggatgcctcggcgcatcgaggagaggcctcgctggaggtgatgtgtcatccggcgtttgtggacaacattattcgccagagcgcctattgttacccccgcttaactgaactggaggtgttgacgtctgcgtcactcaaggcagcgattgcggaacgtggatatcgtcctggcagttttcttgatatttagctcctgagtttgcggcgcaagaatgcgccgcattttttgctgtttatgcaggaatcgcgttaattttccccgcacgcgaccagacacggtgtgccgccatcagcgtcagcagagtgtccataaagtggtggtcaacgttatctgcctcaacaagtccttcttccccctggctatcaatgtttaaaagcgccttaaaccgtcgggcgtcgcctgccagtgcgatgggcttcagatgtttgtaggcttccagaaggtagtaacgggcatcgccgcaactctcgatatcggcaatattgccgcacggtactattaccgcatcgaccgttagcgacggcgcgccggcaaaggttgccgcaatcgttaatgttgaaccatcatcagccgttacttcacccatccgtgaatagagcagttttgcgtggacgcctttggcttttaaagcctgcaaaatggtcaacagttcggcggcgttaactttgtcgttcagcagaatagcgaccactcggcctttaacatcgccgtccggcaccgcatacaggctgagcgccggatcttttttcagaccgttgacatcaggaggcggggcaatttgcgtttgctcatgggtgagtgcaaaaccgagattatgcgcgacgccctgagccagcgtgacatcaatatgcgctaactgatcgaccacccgctcccgaatatacgcgcgggcgactttacccagttcaaagctgaacgcgtcaataatatgctgctgttctatcggcgtctgactgagccagaacaggcgaggatgcgagtaatattcaccgaaagaggggctgcgttcgcggattttattgccatccacgcgttcctggtatgattcgaagccgccgcgttttggcgctggcggcgtttcgcgtggccagttgtcattaatggagtttggttcatagttcgccggattggtgtcgatatccatccggtgcataccgtcacgctggaagttatggtaggggcaggtagggcggttaatcggaatttcgtggaagtttggcccgcccagacgactgatttgcgtgtcggtataagagaacagacgcccctgtaacagcggatcgttggtaaaatcaatgccgggaacaatatgtcctggatgaaatgccgcctgttcgttttcagcgaaaaagttatccggattacggtttaacaccattttgccgacgcgttgtactggcaccaactcttccggaatcagtttggtcggatcgagcagatcaaaatcgaatttaaattcatcctcttcggcaatgagttgtaggcccagctcgtattccgggaaatcgcccgcttcgatggcctcccacagatcccggcggtgaaaatccggatcgcgaccggtcagtttttgtgactcatcccataccagcgaggctttacctgccaacggtttccagtggaaacggacaaaggtcgctttcccttgtgcattgatcagacggaaggtgtgaatgccgaacccttccatcgtccgataactgcgtggaataccgcgatccgacattgcccacatgacgttgtgcagcgtctcaggctgtaaggaaacatagtcccagaaggtgtcgtgcgcactctgcccttgcggaatagcccaatgtggttcgggcttaacggcgtgcacaaaatccggaaacttatgcgcatcctggataaaaaagatcggcgtgttattaccgacgagatcgaaaattccctcttcggtataaaatttggtcgcaaaaccgcggatatcacgtacggtatcagcagaccccgcgccgccctgtactgtcgaaaagcgaacaaagaccggggtaattttctgtggatcgcacagaaacgcggctttcgtgatgtcgctcaggtctttatatggctggaaatagccgtgcgctgcagatccgcgggcgtgaacgatcctctccgggatgcgctcatggtcaaagtgggtaattttctcgcgcaggataaaatcttccaacagcgtagggccgcggctgccggcgcgaagagaattttgatcgtcggcgatgcgcacgccctgattggtggtcagcgcataattttcgctgcctttacgaaaggcgtcgagggcagtgagcttatcattcgcggtctcgggcgcttttaagctgccgggggccgtcggttgcgcgcccggcggcgtcgtttctggcgtggggcgatgtgaaccgtctgacggcgccagggagtccaggccgggctgtgattcacgggtatcatgcacgggggactgatggggggatttctcattatgcgacattgaactcgtctcctgctttcatcactgaaatgggcgtggtagtagtcaaaatcactctaactatagaacatttcagcaattatgctgggggagagcggaacggcagacagggtataacagggaaatcgcacgcgcggaacaggacgtcgggggcgaagatcggctaaaatagtgtttttctgatttttagccttagagcctatcccagtaggcgttattggcgcagccagtttggacacggacagcgcgcaaaaaccggagcgtacacgtagtacgtgaggattttgagcactgcccaggaccaaaatggcaagtaaaatagccctaatgggataggctcttagcctcttttagtgaagcattaatgatgaaacctcttcgccagcaaaatcgccagattattagctatattccgcgtgttgaacccgcgccgccggaacatgcgataaaaatggatacgtttcgcgacgtctggatactgcgcggtaaatatgttgcctttgttctgacgggggagtcatttcaacggtcgcccgcctttagcgtgccagaatcggcgcaacgttgggcgaatcaggttcgccaggaaaacgaaatcgctgactaagaaaaaacaaaacgccggtactggagaccggcgtttttagtgacagacattttgagttgccgatcgtcatgtctcagacgatgtgaacgcccgataatgtattatcgatgcgccagttcagcgtcttcttcgctatcgagaatggttttatcggtctgcttcagccactggctggtcagcgtaccagcggtcattgagccactcacgttcagcgcggtacggcccatatcaatcaacggttcgacggagattaacagcgcgaccagcgtgaccggtaagcccatggcaggcagcacaatcagcgcggcgaaggtcgcgccgccgccaacgccggcaacacccgccgaacttacagtaacgatacccaccagcgtggctatccatacggggtctaaggggttgatgccgaccgtcggcgcaaccattaccgccaacatcgcaggataaagaccggcacaaccgttttggccgatggtcgcgccaaaagaggcagcaaagctggcgatggactccggcacgcccaggcggcgggtttgcgcttcgacattaagtggaatggaggcggcgctggagcggctggtaaaggcaaatgtcagcaccggccacaccttgcggaaatatttcagcgggctaatcccgttcacgcccaatagtatgccgtgaaccacaaacattatcgccagaccaagatatgacgctaccacgaagcttccaagcttaataatgtcctgcagattggagccggcaaccactttcgtcatcagcgccagtacgccgtaaggcgtaagttgcatcaccagacgcaccagcttcatcacccagctttgcagggtatcgatagcaacaagcacacgctcgccttttggcgcatcatctttcagcagtttaagcgcggccacgcccaggaatgcggcgaaaatcaccacgctgataatagacgtaggatttgcgccagtcagatccgcaaacggatttttcggtacaaaagacagcaccagttgcggcacgctgagatcggccactttgccgacatagctcgtctcaatggcattcagacgcgcggtttccgcgccgccctgaaccagaccttccgccgtcagtccgaacagattggtgaccagcacgcccaccagcgctgcgataagggtagtaaacagcagcgtgccgatagtcagaaaactgattttccccaattgagaggcgttatgcagtcgtgccacggcgcttaaaatagaggcgaataccagcggcatcacaatcatttgtagcaattgcacatagccgttgccgacaatattgaaccactgaatggagtcttttaacacctgactgtcagcgccataaatggtgtgcagggccagaccaaagaccacgcccatcacaaggccgacaagcacttttttagccagactccactgtttatgacgggcctgcgccagtacaaacagcagaatgacgaacaccgcaatgttcgcaattaatggaaaattcatccccgttctcctgatttttttattatgaagcgctgtgttttagcgattctgttcgcgcaagattagcagaactgtgagctggctcttatattcaaatggaatggtttataccaaaaatgattttggcgttgatttactaatcaatctggtgatttataaaacgattgaactgcatttgcaggatagtaatcatctgcgaagaccagcgtatgacgttgttttccggcatggactgtggcatccacaccgcccaggcaaacaacgccatgcataaaaatcgctccagttgattgcctttgcgcggcgccagaataggcaggcggaaacgccagcggcacggccacagtaagggaacgcctgcgggggtgagcatatccgcgacgatatggcttaaatagccaagtaccatgccttgcagcgcatccgccgggataatccacgtatccggtaccttgagataaaaggtcgccagtagggcaaagaccgccagcagactatgggtaaacccccggtgaccgaacgcgcgggcgatcggtttcgatacccatttcaggcgctgaccaagaaaagatttggggtggtcgatatccggcagcagacaggtcaaaatagccgaaggaataatatgccaccagtcgccgtgcgcaaggacgggcgttaactcggcattcttggcgaaaaccgcgctggctatagaaaaaagaagatgtccttccgccgtcatgataaaacccattaaactgtcaattcatacagtatagggtttttatacagtaggcggaagtggtgacgttgtaactctttgtctctgtcaaagccgcttgccgtctggctcagcggctaattgcccgttgactttgtttcggaaacatcttaaccgagtagatgcgccgccgtcagctctgtcagtgagttaagtttgacattcgccagcgcaaagcgcggatcaggctggttttcttctgctggcaccacaatggcgcgcattcgcgccgcctttgccgcgattaaaccattcaccgaatcctccagcgccacgcaggttaatggatcaacgcctaatttggccgcacaatccagatagacctgcgggtgcggtttgctgtagggcaatttttctgcagaagccagcgcgtcaaaactgtcgcgcagttcaaacatggtgagcactttttccagcatatgcagcggcgatgccgaggcaagccccactaatagcccctgcgctttacacagcgccacagcttcgcgcacacccggcaaaagagggcgcgtctcttcgataagcgtaatcgcgcgggcaataacacggtttgtcacttcctggcgatcggggccgttccacggttgctgcgcaaaccagagatcgacaaccatatcaatgcgtagcccaagcgtgtctggcagctcatggcgccgagtaatatctacgcctaaacttgccatcacgtccagttcagcgcgatcccagagcggttcggaatcgatcagtagtccatccatatcgaaaattgcagcaagaatttgacgtggggttgacatcacaacctctcctgttgagattaaaaaataacgaattaagcgttcattatgaccatgttcttagtatatcgcccttaaagatcaggcgaaaacgggaatcaacaggtagacttaggccaaaacgacgcgtctttatcaaggggaactcatgacgtatcaacaagctggacgcattgcaatcctaaaaagagttgttgggtgggttatttttattccggcactgctttccacgctcatctcagtccttaaatttatgtatgcgcacagtgaaaagcaggaggggataaatgcggtaatgctggattttacccacgtaatgatagacatgatgcgcgtgaatacgccgtttctgaatgttttttggtacaactcgccgacgccgaattttcagggaagcctgaatatcggtttctggctcatttttattctgatttttgtcgggctggcgatgcaggattccggcgccagaatgagccgccagtcacgttttttgcgtgaaggcgtggaagatcagttgatcctggaaaaagcaaaaggcgcggaagggctaacgcgtgagcagatagagtcacgtatcgtggtgccgcaccataccatctttttacagtttttcccgctctatattttgccggtcattattatcgtgctcggctactttttcttttccttgttaggcttcatgtaaactgaaaaatgccggatagcccgtatccggcatgggctgtacctataccgcaagcagccgatccatcgctttttgcgcagtagccaggtgctgaccgccaaacagccttgcccgattaagcagggtgtagagctggtaaatcggctgcctgtcgagaaaatccagcggtagcggcgaaacggactgatagccgtcataaatctgcggtggctgatcggtatgcagcggcagcatcgccagatcgcattctctgtcgccccaatagcaggctggatcgaagatataggggccgtcagggccaagcgcgcagttcgccgaccatagatcgccatgcaaaagagaaggctgcggttgatgcgacgccagacgttgctgaacatgttcaacaatggcgtcaatattaccaaaagtaatgcctttttccgcagcgagttcaagctgccagccaatgcgctgttcggcgaaaaaagtcgaccaacggcgttgccaggtattcggctgcggcgtggtagagagcgcgttatcaaaatcgaggccgaattgaggttggtcgctccattggtgcaggcgcgccagctgttgcccaagaataaacgcattatgggcatccagcgggcggggcgagaggtagtccatgactaaaaagctgtaatcccgatccgaacctaccgcccataccttaggcacaacaacggttttactgcgggagagcagctccagctgatcggcttctgcggtaaaaccgcggagcatttctcgttcatcgcacttcacgaaaaaatcatggcctgcataacgtaaatgccatgcggcatgaacttctccgcctggcagttcattacgcagttcgatttcgccttcaccgacttgctcgcttaaaagacgactgatagcttgccacataatgtctctccccacgttgtctgccagatcataaggttagtgcaaaaatgcggttgaaaaatacgaactaacgcacatcgcggacgcgccgcggcgggaatggcacttattgtgcgtttttactccacgcctcccaggtcgccacggtaatgtcgacatccttatctaacgcgcttttcgcaagtccggcgacaagcgctttgatttcatcagcgctctgagcgctaacaaagccaaacgtattggtgccgagctcatgcacatccccttcatcgtccgttaatgtcagcaaaaaaccgctacgcgtcagatggttattgagttcgttaatctcggtcagggaatcttcatggaaggttacggtaataacataacgggtaatatcgccactggccatcgttcacctcgttgggagcaactgtgtttttaacagcggcggatgcgccgcccgttaaccgattttccgttatccccctcggcgagggggaaacgattattgcgcggaaagataggcgtatattttttgggtatcgtcacgagaacacagacgcgtaccttgattgagcgtagcagcgctgcctgccgccacaccgaagcgcaccatctcttccagcgacgcgtcttgcgccagttttaacgtcatcgcgcctaccatactgtcgcctgcgccaacagtactttgacttttcaccgggggaggaacaacctggatgcaattctcactgtctatgcccagcgccccttgcggccccagagagaccactacccggcgagccttgccgctttgcactaattcctgggccgctttacgcacatcatcaggctgcgtcagatcacgattaaccaacgcgctcaattctttcaggttcggtttcaccagttcgatatcgccaagcgccagcgcggcggtgagcgcgtcgccagagctatcaataatgcagcgaatgccttgcttctgcgcggcggaaatcagttgcgtgagtttctcgaccttaacgccgggcggaaggctgccgctgataaccagaattgccccggattcaatttccagtacctgttcttcaagctggcgaaattcgtcatcgtccagcgtggcgccgggcataacaaaacgatactgttcgccgctggactcgacgtggacgtgcaggttctgacgcgtccagtccttcgcatcgacggtagacacggggacattttcgtcagccagtagtgcgacaagatgttcgccggtagcgccgccagccgggaaaatggcggtcgcggtgccgccaagatgcgcaatggcgcgagcgacattaatacccccgccgccgggttcgaataccggcgcggagcaccgcagtttaccttcgggataaatttgcggcgtgattgttgcgctatcgagagagggcgcaagcgtcaacgtatagatacgtaccatcgttacctcctgttaggctgatttcagtctggcacttaatccccggaaagtgaaggaattaacaatatgattttccggatctttatttaaagaagtgcgatgtaaagttatataaataaatgaatgcttcgggagggttcttattcaaaaaatgaaatagtaattgattgctatgttattcggggcttcttataattcgctacctttccaggggcgtttgtcattgatccctatgaaagtttccgggaccgtcgtggtctcttttttagttgtacggactctatataaatgaagcttttgaaggcagtacccgctgtagttatgctggcgggtggcgtgttcgcgtctctgtatgccgccgccgatgattccgtttttactgtcatggatgatccctccaccgcgaaaaaaccttttgaaggtaatctgaatgcgggctaccttgctcagtcaggcaatactaaaagctcttccttaacggctgacacggcgatgacctggtatggacaacgtaccgcctggtcattatggggcaatgccagcaatacctcctctaatgatgaacgctcttcagaaaaatatgcggtaggcgcacgtaaccgttttaatatgacggattatgattatacctttggccaggccagttggctgacagaccgtttcaacggttatcgtcagcgcgacgtactgaccgccggttacgggcggcagttccttaatggtccagtgcacagcttccgttttgaattcggtcctggggttcgctatgacgaacatacggacgataccactgaaacgcagccgttgggttatgcttccggcagctatgcctggcagttaactgacaatgctaagtttacacagggggtgtcagtatttggcgcagaagacaccacactaaattcggaaacagccctcaatgtcgccattaacgaacattttggtctaaaggtggggtataatttaacgtggaactcgcagccgcctgaatctgcgcctgaacataccgatcgtcgcactacggtaacgctgggctataagatgtaatattgtaccgggttacgttacgtaacccggttattccgtggtgacgcctcagaagaagaaggtgatgtctccgttgatataagaatagtcgtctccggtgcgaaattccgacgtgactttgtttaaagaaagagaaaatgcgacgggagaatagccgatggtggcaccgacgcgatattcatccacggttttattaatatccaccgtttccatttttgtttgcagcgttttcccctgtaacgtgtagtttttatcaacttccctgcgctcaacgccagcaaatactttatagatcaatccctctttttgagtgtgtattaaccctcggcgggacagtaacccaaacccattatcagagttgaaggtcttatcatttcccagcgcaacggttgcgccgtaccccaaatactggaagagattgccgccgacagcagatacttctggatagaagcccacattgacgcccagaatatcaatagctggcgtaagggacaccattccttttgccgtgtaaccataacggttttcaatttgatcctgccaggcagggtatttttctgcgcctattattcgatgcgcccgattctgaacctcctgaccgcctgcgtcaggaccaataacgccaatatcggtacctaaacgataacgtaaccaattggtggctaatgaattccactccagtccggtatgaagaaaggcgctgaacgcgcggtcgcctttgacggcttcaggctttctcttattggcgcctgatggagaataaatatcttgcgcgatatgaaaagagagttgactggcgtcagtgagatcgtggctgtagcctaaaaagagcccggcagtataatcaccccggtctgcagccgggtgcccataaagggcatttaaggatggttgaaatatacctgcatcatcattcgccactgaaatagcaaggctactggcattggccattgtggtcgtactgagtatggcggcaatcatcgttgcgcaatagctgtatttgttcactttttacccctgaatatgaaagtgaatactcttatttttacaaagtaataagcacagcagcatgatgcgcagtgcctattaaacctttaaatataactaaactcctgccagcagcgagtcattgagaggatacgttgccttaatgttgaaaaatggtgttgaaaaacatgcgtcagatattattgaatatccatttttcattcgctatctgagtgcgagaaattattggcttcacgattatgcatataatacgatgttttttggtatcaatatgaatatcacgttgtattcttttgagctcattttctatgatggcttcgatgtttatctgttattaatttttaccgtgatagtgttgtctttaatgatgagaatatctaacggctgtcagggtaatataaccaaattattgctatctgaattattagggcagttattattaaggaagaaaaagtgaacaagaccattaatttgctaaaattactgcccgtagtattattaagcgcatgtactacatcgtatcctccccaggatacaacatcggcacccgagttaccccatcgtaacgtactcgttcagcaacctgataactgtagcgttggctgtcctcaaggaggaagccaacaaacaatctatcgccatgtctatacgctcaataataatagcgtcacgaaatttgccaactgggttgcctatagcgtgacaaaaaccagccaggcaagcggtcgcccgcggaactgggcgcaggaccccgatttaccgccctcggatacgttggccccttccgcctataaaaatgcccatacgctattaaaagtcgacagggggcaccaggcgccgttggcaggattgggcggcgtatcggactggccgtcgttaaattatttatcgaatattacgccgcagaaatccgccctgaatcagggagcatgggctgcactggaaaaccgggtgcgcgaacttgccaaacaggctgatgtatctgtagtgcacgtagtgaccggccccctttttgagcggcatatcgccacattgccagaagatgcgacggtagaaattcccagcgggtactggaaggttttattcaccggaatggcgccgtcaaaaagtgaaggaaattacgctgcatttattatggatcagaatacgccccgttcggcgaatttttgcgactatcaggttaccgtggaggctatcgaacataaagcgaagccagtgctgacgctgtggtctgctttgcctgaagcggtagccagcgaggtgaaaacgacaaaggggagtctggcgcagaagttaggttgtcgatgagaagcgctatacggcgcgtagaaagataacggagaaaccctgtcaagggtcttgatttgctatagagtgatgcaatctccctttttttagtgttaccatcatcatgccggacgaagatagcgattttcgtctgtgtcgaaggttgtgcgccaatttagcaatggttggctagatggatacacaactcactgtcaataaattcattttctctttgtatgtgatcttgcgtaataagtacaatccttcattcacatccattctcgttcgtttaaacctgtttcaccagttccgcgtcattactggtaatagcggatatatatgtttcataccgttttacattgatccctttcgcgccgtaagatgtacgtacctaatctaacttaagcagggaactgtcattcataacacagagtttattggtatcaatggtagattatattacggtgacaatctcgggatgatccgcatatgagtagatgtggattagggcggagtagcggtaggactaataataaccggcggcgagaaatacataattgaggggctattcataaatcatcatctagaaacgcaagcactatcatgaatatatcataagtaatttacgttggtaatgatggctcagcaaacccaacaagctttacaggaacaatttttacgcttcagagccaaataaaacggcggcattgccgccgtataacttatttattgtttcttagtaaaacgaatcttatatgctctgaaaaaacaaaggaagatgcaatgtataccataaaagcaatcatcaaatgctcagggaacaaccatcccatgctaacaggaatcacacttattccaatgcaaaataggaacattatgaaataatgcgctgactttgtttcctgagttttattggagaaatacttagctaggacgcctttaaatactccagatataactaaccaaactggtgtaaaaagcccgaaatctgcgtatagttcaccatacccgaaagcaggagcgccctgatttctgtagaatgcatcagggaaaaatacttttgccagatacaatgcgccaaaatcttcaggcttatcaggccaaatagccctcggaatcctcgagtaaacctcgctttccattagtaattttccgtacataaagtcaaagtttgaggaagcaacaagaacagcattacgggtataatccgagtaattcgccatattttctatcggattcccatcagtaaacgtatatgcaaagaatgccgttacaatgactgctataacagcaaacgattttaccaggaacataaatttaatttttttattttcaatatatgaaaggtaaaggatgaatgctataaatatactaaatattggtcctttgttaccatgcaagaaaataagtatacagttaaataaaactatggaaatacaaaataactttgattttttgtatgtaaagaacgcgcaaatagaagcgacaagagaaaacattaatgaaggatagaagtatataccataccctgttctggttaattcgtatattcttcttgggctaagtatatactctctgaactccatcaacactggaaggtaaatgataaaagcaaggaaggtgaataacaatgaagtaaacacataccttggtttatttttcgtgtttgatttgttgtatatgggttttctttgtgtgtaaagataagaaataacaaatgatgctatgtatgttatatagcaagtatagaaaaacaaatattccactgtataattctgcacctctgagaggtatacaaatataccttcaaacacgtacagtgtagggactgttattatcaggtatgggaccattacatttattattttcccctcaattcttacggaaagagtatagagataaactataaataataagcataatgcaatgtatgaaattataagcatatagagcctttagaaaaaatgcttagtattaaaaatattaccatcaggcaaataaggtgtggtacggaaaatcttctggcaagatattctgaatctggtagtctataatcattactcatcactatcttcccgatatcaaaaccgtgttattgacatattaacactcattaacactcctatctactgcgcctccgatagcatgaagctatcaagcatttgcagcacaaacatcaaacaatgtaaatgcttttgataattacacatgattgttactgtgtttatatacagtggcattcgaagattcatcatgaggttcccgagtcctgtaaaagactatacagagaaagagctatcactcgacgagtaattcatctcacatcgtgccgcgacatacttcaagcaacacagacgaattacaagtacggcatcataagtgagacgttgctagttatagaagcttcatagcagcatgtaatggctctttgctggtatgtgctttggaaagtgggtttcgtattgtgcgttatcgcatgctgccaggtccccatctggagaatatagatagcggtcgtcgtgaaaagctatctgatgtgaatgcctcatacggtggcagtaagccgagactcagagtgaccatgtacatcattaacgatacgcgtgccgggtagtgtgttgggattcaggttctgtagaacagaaagatgcaatctccctttttttagtgttaccatcatcatgccggacgaaaatagcgattttcgtctgtgtcgaaggttgtgcgccaatttagcaatggttggctagatggatacacaactcactgtcaataaattcattttctctttgtatgtgatcttgcgtatgggtcaccactgcaaataaggatataacatgcctgttattactcttcctgatggcagccaacgccattatgaccaccctgtaagcccgatggatgttgctctggacattggtcctggcctggcgaaagccaccattgcgggccgtgtgaatggcgagctggttgatgcttccgatctgattgaaaatgatgcgacgctttccatcatcaccgcaaaagatgaagagggtctggagatcattcgtcactcttgtgcgcatctgttaggtcacgctatcaagcaactttggccgcacacgaaaatggcgatcggcccggttgtcgacaacggtttttactatgacgttgatcttgaccgcacgctaactcaggaagatgtcgaagcgctcgaaaagcggatgcatgagctcgccgagaaaaattacgacgttatcaagaaaaaggtgagctggcatgacgcgcgcgaaaccttcgtgaagcgcggcgagacttacaaagtcgctattcttgatgaaaatatcgcccatgatgataagccaggcttgtaccatcatgaagaatatgtcgacatgtgtcgtggtccgcacgtgccgaatatgcgtttctgccatcactttaaactgatgaaaactgccggcgcatactggcgcggtgacagcaataataagatgttgcagcgtatttacggtacggcatgggcagataaaaaagccctgaacgcttatctgcagcgcctggaagaggccgcaaaacgcgaccatcgtaaaattggtaagcagctcgacctgtatcatatgcaggaagaagcgccgggcatggtgttctggcataacgacggctggactatcttccgcgagctggaggtctttgttcgttctaaactcaaagaataccagtatcaagaagttaaaggcccgttcatgatggaccgtgtgctgtgggaaaaaaccgggcactgggacaactataaagatgcgatgttcaccacatcctcagaaaaccgcgaatattgcatcaagccgatgaactgcccgggccacgttcagatctttaaccagggtctgaaatcctatcgtgatttgccgctgcgtatggcggaattcggtagctgccaccgtaacgagccatcaggcgcgctgcatggtctgatgcgcgtacgcggctttacgcaggatgatgcgcatatcttctgcaccgaagagcagatccgcgatgaagttaacgcttgtattcgtatggtctacgatatgtacagcacctttggcttcgagaagatcgtcgtcaagctttccactcgtcctgataagcgtatcggcagcgatgagatgtgggatcgtgctgaggcggatctggcggttgcgctggaagaaaataatatcccgtttgagtatcaactgggtgaaggcgcattctacggtccgaaaattgaatttaccttatatgactgcctcgatcgtgcatggcagtgcggtacagtacagctggacttctccttaccgtctcgtctgagcgcctcctatgtaggcgaagacaacgagcgtaaggtgccggtaatgattcaccgtgcgattcttgggtcgatggaacgcttcatcggtatcctgaccgaagagttcgctggtttcttcccgacatggctcgcgcctgttcaggtagtcgtgatgaatattaccgattcgcagtctgaatacgttaacgaattgacgcagaaactacaaaatgcgggcattcgtgtaaaagcagacttgagaaatgagaagattggctttaaaatccgcgagcacactttacgtcgtgtcccttatatgttggtctgtggtgataaagaggtggaagcaggcaaagttgccgttcgcacccgccgcggtaaagacctgggcagtctggacgtaaatgacgtgattgagaagctgcaacaagagattcgcagccgcagtcttcaacaactggaggaataaagtattaaaggcggaaaacgagttcaaacggcgcgtccgaatcgtattaatagcgaaattcgcgcgcaagaagttcgcttaacaggtctggaaggcgagcagcttggtattgtgagtctgagagaagctctggaaaaagctgaagaagccggagtagacttagtcgaaatcagccctaacgccgagccgccggtttgtcgtataatggattacggcaaattcctctatgaaaagagtaagtcttctaaggaacagaagaaaaagcaaaaagttatccaggtgaaggaaattaaattccgtcctgggacagatgaaggcgactatcaggtaaaactccgcagcctgattcgctttctcgaagagggcgataaggccaaaatcacgctgcgtttccgcggtcgtgaaatggcccaccagcaaatcggtatggaagtgcttaatcgcgtgaaagacgatttgcaagaactggcagtggtcgaatccttcccaacgaagatcgaaggccgtcagatgatcatggtgcttgctcctaagaagaaacagtaaggccttcaagtaacaattctgtgaagccttcgggcttcacaggctttgttcgcctatgtttcgtttattaacaatgcgaagtggaagttattaaaatgccaaaaattaagaccgtacgcggtgctgctaagcgcttcaaaaaaaccggtaaaggtggttttaagcacaagcacgctaacctgcgtcacattctgaccaaaaaagcgactaaacgtaaacgtcacctgcgtccgaaagccatggtttctaaaggcgatctgggcctggttatcgcgtgcctgccgtacgcataagccgttaacgtttttaactttttaattagaatagatacaggagagcacatatggctcgcgtaaaacgtggtgtaattgcacgcgcacgtcacaagaaaattttgaaacaagccaaaggctactacggtgcgcgttctcgcgtataccgcgttgccttccaggcagttatcaaagctggtcagtatgcttaccgtgaccgtcgtcaacgtaagcgtcagttccgtcaactgtggattgcgcgtatcaacgcagcagcacgtcagaacggtatttcttacagcaaattcatcaacggcctgaaaaaagcctctgttgaaatcgaccgtaagatcctggctgatatcgccgtattcgacaaagtcgcgttcaccgcgctggttgaaaaagcgaaagcagctctggcataagccagtgaaaagagggagcctggctccctctcttttatttactgttcagtgagttgacaattgacctgtaacccttttcaataaaggatattcggttttaccacataaggtaacgcaagcatgaacgctgctattttccgtttctttttttactttagcacctgatcccaggaggctagcgcgtgaaaaacgaaacgaaaaacagcgcaaaaaagcctcctgatggaggctttttttgtatctgaaatcgagagattacgtccaatgaaccggtgtcttcaccgacacaatgaggaaaaccatgtcacatctcgcagagctggttgccaatgcagcggccgccattaaccaggcgtcagatgttgccgcgttagacaatgtacgcgtcgaatatttgggcaagaaagggcatttaacccttcagatgacgaccctacgcgatctgccgccggaagagcgtccggcagccggggcagtcattaacgccgcgaaagagcaggtacaacaggcgcttaacgcgcgtaaagccgagctggaaagcgcagcgcttaacgcccgtctggccgctgagaccatcgatatctccctgccggggcgccgtattgagaacggtggtctgcatccggtcacgcgtaccattgaccgtattgaaagtttcttcggcgagcttggttttaccgtggcgactggcccggaaattgaagatgactaccataacttcgatgcgttaaacattccgggtcatcacccggcccgcgccgatcatgataccttctggtttgacgcgacccgtctgctgcgtacccagacgtctggcgtccagatccggacgatgaaagcgcagcaaccgccgatccgtattattgcgccgggccgtgtataccgtaatgactacgaccagacgcatactccgatgttccatcagatggaaggtctgattgttgataccaacatcagcttcaccaacctcaaaggtacgctgcacgacttcctgcgtaatttctttgaggaggatctgcagattcgcttccgtccttcttattttccgttcaccgaaccttctgcggaagtggatgtgatgggtaaaaacggcaaatggctggaagtgctgggctgcgggatggtgcatccgaatgtgctgcgtaatgtcggtatcgatccggaaatctattctggcttcgcttttggtatggggatggaacgtctgaccatgttgcgttacggcgtcaccgacctgcgttcattcttcgaaaacgatctgcgtttccttaaacagtttaaataaaggcaggataaaacaatgaaattcagcgaactgtggttacgcgagtgggttaacccggcaattgatagcgatgcgttggctaaccagattacgatggctggcctggaagtagacggcgttgagccggtcgcgggaagcttcaatggcgttgtggttggggaagtggttgagtgcgcccagcatccgaacgctgacaaattgcgtgtaacgaaagtcaacgtcggcggagaacgcctgttggatatcgtctgcggcgcgccaaactgtcgtcaggggctgaaagtagcggtggccaccattggcgctattctgccgggcgatttcaaaattaaagcggcaaaactgcgtggcgaaccgtctgaagggatgctgtgctccttctccgaactggggatttccgacgatcacagcggcattatcgaactgccggcggatgcgccgctgggtaccgatatccgtgaatacctgaagcttgacgacaataccatcgaaattagcgtcacgccgaaccgtgcggattgcttaggtatcatcggcgttgcgcgcgatgtggcggtactgaacaaagcgccgctccaggagcctgaaatggcgccggttacggcaaccatcagcgatacgctgccgattacggtagaggccgctgatgcgtgtcctcgctatctgggccgggtggtaaaaggcattaatgttaacgcgccgacgccgctgtggatgaaagagaaactgcgtcgctgcggtattcgctccatcgatgcggtggttgacgtcacgaactatgtgctgctcgaactgggtcagccaatgcatgctttcgataaagatcgcattgatggcggtattgtcgtgcggatggcaaaagagggtgaaaccgtcgtcctgctggacggtagcgaagcgacgttaaatgcggacacgctggtgatcgccgatcaccataaggcgctggggatagccggtatttttggcggcgaacattccggcgtgaacggcgaaacgcaaaatgtgctgctggaatgtgcgtactttaatccgctgtctatcaccggtcgcgctcgccgccacggtctgcataccgatgcgtctcaccgctacgagcgcggggtggacccggcgctgcaatataaagcgatagagcgcgctactcgtctgcttcttgatatctgtggcggtgatgcgggtccgataattgatgtgagcaacgaagcaacgttgccgaaacgcgccaccattacgctgcgtcgcagtaaactggatcgcctgatcgggcatcatattgcggatgagcaggtcagtgatattctgcgtcgtctgggctgtgaagtgaccgaagggcaggacgagtggaaagccgtagcgccgacctggcgtttcgatatggagattgaagaagatctggtggaagaggtggcccgcgtttacggctataacaatattccggacgagccaattcaggccggtttaatcatggggacgcaccgtgaagccgatctgtcgttgaagcgggttaaaaccatgctgaacgacaaaggctatcaggaagtgattacctatagctttgtcgatcctaaagtacaacagctcatccatccaggcgcagaagcgctgctgctgccaaaccctatctccgttgagatgtcggcgatgcgtctgtctctgtggagcggattgttggcgacggtggtctataaccaaaaccgtcagcagaatcgcgtgcgtatttttgaaaccggtttacgtttcgttccggatacacaagccaatctgggtattcgacaggatctgatgctggctggcgtgatttgcggtaaccgctatgatgagcactggaacctggcaaaagagaccgttgatttctatgatttgaaaggcgatctggaagcagtactggatttaaccggcaaactgggtgatatccagtttaaggcggagatgaatccggctctgcatccgggacagtctgcggcgatttatctgaaagatgaacgtattggttttattggggttgttcaccctgaactggaacgtaaactggatctgaatggtcgtacgctggtgtttgaactggaatggaataagctcgcagaccgtatcgtgccgcaggcgcgggagatttcacgcttcccggccaaccgtcgcgatattgcggttgttgttgcagaaaacgttcccgcagcggatattttatccgaatgtaagaaagttggcgtaaatcaggtagttggcgtaaacttatttgacgtgtaccgcggtaagggtgttgcggagggttataagagcctcgctatcagcctgatccttcaggataccaaccgtacactcgaagaagaggagattgccgctaccgtcgccaaatgtgtagaggcattaaaagagcgattccaggcatcattgagggattgaacctatggcgcttacaaaagctgaaatgtcagaatatctgtttgataagcttgggcttagcaagcgggatgccaaagaactggttgaactgtttttcgaagagatccgtcgtgctctggaaaacggtgagcaggtgaaactctctggttttggtaacttcgatctgcgtgataaaaatcaacgtccggggcgtaacccgaaaacgggtgaagatattcctattacagcacggcgcgtggtgaccttcagacccgggcagaagttaaagagccgggtcgaaaacgcttcgcccaaagaagagtaatcagatccaggcataacatccatcagggtgtattgcggcagatacgctgccatcccgaaagtagatcagcgggatgacagcgtatttgtcagcctgaaagatgacccgtataactaaaaaggccgcattgcggccttttttctttcaagtaaaggatacccaccgtaaaatcacgctacctcttttcagctgaatggataacatgctgacttttgcccgccaacaacagcgacgaaacgttcgctggcttctgagcctgtcactgctggtgctactggctacacttctgagcttatgcgcaggcgaacagtggattgcccccggtgactggttaagcgcccggggggaactgtttgtctggcaaattcgccttccccgcacgcttgcggtattgctggttggcgctgcgctggcgctatctggcgctgtgatgcaggcgctgtttgaaaacccacttgctgaaccgggtctgctcggcgtttcgaatggggccggtgttgggcttattgccgccgtcttactggggcaggggcaactgccaggatgggcgctgggactgtgcgctatagccggcgcgctcattattacgttaattctgctgcgttttgcgcgccgccatctctctaccagccgcttgttgttggcgggcgtcgcgctgggcattatctgtagcgcgctgatgacgtgggctatctatttttccacctctttcgatctgcggcaattaatgtactggatgatgggaggatttggcggcgttgactggcagcagagctggctaatgattgcgctcatcccggtactgatctggatatgttgccagtcgcaaccgctgaatatgctggcgctaggggaaacctcggcgcggcagcttggcctgccgctgtggttctggcgcaatttgttggtcgtcgccaccggctggatggtgggcgtcagcgtggcgatggcgggggcgattggttttatcggtctggttattccgcacatcctgcgcttatgtggtttaaccgatcaccgggttttacttcccggctgcgcgctggccggggctatcgccctgctattggctgatgtggtcgcccgactggcactggcgtcggctgaactgcctatcggggtggtcaccgccacattgggggcgccagtgtttatctggctgctactcaaatccgcgcgttagcgcatcggtaaacaactgctttcatcattcgcagtctatgattaaaggctaacgatgaaacccgctattctaccgacatcagggagacaccatgcaaaactcgcttcttaatactcacgttacgacgattgatggagaggtcactacacttgaaaaatacgccggaaaagtgctgctcattgtaaacgtcgcctccagatgtggcctgacgccgcaatatgaacagttggaaaatatccaaaaggcgtgggcagatcaggggtttgtcgtgttgggttttccctgcaaccagtttatggggcaggagccaggcagcgaagaggagattaaaacctattgtgccagcacctggggcgtcacgttcccgatgttcagtaaaattgatgtgaatggcgacgcgcgccatccgctgtatcaaaaactgatagccgctgcgccaacggcagtcgcgccggagaagagcggcttttacgaacggatggtaagcaaagggcgtacgccactctatccggatgatattctgtggaattttgaaaaatttttggtaggccgggatggtcaggtggtacagcgtttttcgccggatatgacgcctgaagatcctattgtgatggaaagcataaaaatcgcgttggcaaaataatgtctcaattgatgcaattaaaggatgtcgccgagagcacccgcctggggccgctttccggcgaagtaagcgcaggagagatccttcatcttgtcgggccgaacggtgccgggaaaagcacgctactggcgcgtatggcggggttaacctccggcgaggggagcatcaggtttggcggagcgccgctggaggcatgggcgacggcaacgcttgcccaacaccgcgcttatcttgcgcaacagcaaaatccgccgttcgccatgccggtctggcattacctgacattgcatcaacctgataaaacgcgaaccgggcagcttaacgaggtggccgatatgcttggattgggcgacaaactggggcgaagcgtgaatcagctttccggtggcgagtggcagcgtgttcgccttgctgccgttgtactacaaattcatcccgacgctaatccggtcggtcaattattgctgcttgatgagccgatgaacagtctcgatgttgcgcaacaaaacgctctggatcgggtattacatcatttatgtcaggcaggaattgcgattgtgatgagtagccacgatctgaaccacacgctgcgccatgcgcataaagcctggttactaaagcgcggtaaactcattgcctgcggccgccgggaagaggtgctcaccccctcttatctggcgcaagcctacggtttgcgctttcgacgactcgacgtcgaggggcatccaatgctcatttcggccacttaagtaaaatcgtttcttgaaaagcaggtaatttcgacgctaaattaataccaaaataaaaacagaggattgttgcggcatgcgtttttggcttcttgttatcacagcattgttcctggcaggatgcagtactcatcgggcaccggcgccaaatgccagattatcagactccattaccgtcattgcgggtctgaacgatcagttgcagtcctggcgcggtacgccataccgttacggcggcatgagtcgcagaggcgtggactgttccggctttgtggtagtcactatgcgcgacaagtttgatttgcagttgcctcgtgatacgcgtgaacaatcaaaaatcggcaccagaatcgataaagatgaattgctgcccggagatttggttttctttaaaaccggttcgggcgaaagtggtttacatgttggtatttacgatacaaataatgagtttattcatgcctctaccagtcgtggcgtgatgcgttcatcgctggataatgtgtactggcgaaaaaacttctggcaggcacggcgaatttaacctcgcagacgatataaattttatagtctatttttaacatatcgccggttgaacttatgacatctgttgtcatcatatataatgatataaccgtagcatttacaaacgtacttttattaaaaacgggcgtgttcacgccctgtgaaaagtacaagattgaatattggtttataatcagagtaagttaaaaaaaggaaccggttcaccggtaaacaagaaaaatgatgacgcttcaattagtatctgaagttacgtctgtttccgtccgtagtgactggatggcgaatagcgccctaaccatgggactggcgtaatgattgcttcacttgatgagctttaccattccgaactctttttccttcccgtcatggatgaaaacgctcggcttgttggtttagagattattgcaacgtttgccgctgaagacggcgccgtgcggatgccgactgagttggtagcgcctcgcctttcggtggaggaacaatactgtctgtttgttgaaaaactggcgttgttagaaacctgtcagcacttttttattcagcataaacttattgcatggcttaatttaccgcctgcaattagtgacttattattattagatagcgaacttttttcccgggcagcgcgctttccgtttcttgaattagctataaatgagaattatcctgggttaaaccagggcaaaaacaatgaaacgttagctaatctggcaatgcatttcccattaatgctggcaaattttggggcaggcgaggcgtcgactaaagctattttcgatgggcttttcaaacgagtcatgttggataaaaattttattcagcagcgagctgaaatgatctcattcgaaccattcatgcacgctattgttgcccagatctcctccagctgcgagtcgctgatgattgccggtattgatactgaggcgatgtttgcgcgcgcagcgccattggggtttagcgcattccagggcggactatggcctccggtgccggtaagccagctcattaaactcgttcagcgataacctttctgtttgccggtgtttaaccggtgattaaccgtctacactgaagacaggaggccctatgaccctgtcttttactgcccgttggcgcgatgaattgccagcaacgtataccgcgcttttacccacaccgttaaaaaatgcgcgactgatttggtataacgacgaactggcgcagcagttagccattcccgcttcgttatttgatgctaccaatggcgctggcgtttggggcggcgaaaccttattacccggtatgtcgcctgtcgcgcaggtatatagcgggcatcagttcggcgtctgggcgggacaactcggcgacggacgcggtattttgctgggcgaacagctcctggcggatggctcgacgctcgactggcatctgaaaggcgccggattaacaccctattcgcgaatgggggatggacgcgccgtcctgcgttcaaccatacgagaaagccttgccagcgaagccatgcattatctgggtattcccactacgcgcgcgttatctatcgtaaccagcgatacgccggttcagcgagagacgcaggaaacgggcgcgatgttaatgcgtctggcgcaaagtcatatgcgttttggtcatttcgaacatttctactaccgccgtgagccggaaaaagttcagcaactggctgatttcgctattcgtcattactggccgcaatggcaggatgtcccggaaaaatatgctttgtggtttgaagaggtggcggcgcgtaccggaagactcatcgccgagtggcaaaccgtcggttttgcgcacggcgttatgaatacggataacatgtcgattctggggctgaccatcgactatggtccctttggttttctcgatgactacgatcccggcttcattggtaaccattccgatcatcagggacgttaccgcttcgataatcaaccgtcggtggcgctgtggaatttacaacgtctggcgcagacgttaaccccttttattgagatcgacgcgttaaacagagcgctggatcgttaccaggacgcgttgttaacgcactatgggcagcgaatgcgccagaagctgggcttctttaccgagcaaaaagacgataacgttttactgaatgaattgtttagtctgatggcgcgcgaagggagtgattatacccgtacatttcggatgttaagccatacggagcaacagagcgcctcctcgccgttgcgggatacgtttatcgatcgcgcggcgtttgatgcctggttcgatcgctaccgggcgcgattgcgcacagaggcggtggatgacgcgctgcgccagcagcagatgcaacgcgtgaatcctgcgattgtgttgcgcaactggctggcgcaacgcgcgatagatgcggctgaacagggagacatggcggaactgcatcggttgcatgaagttttacgtcaaccttttaccgatcgagatgatgactatgcccgccgaccaccggagtggggaaagcggctggaggtcagttgttcaagttagcctgatgccagcagcatcgtctgctggcggagcgctatttggttaacagtagcttcccggcctgagttttgcgcaacagatactcctgaccgttgtgatcgataatgactttgccgtccggacctaatagcgcctgactgttgacgcgccgttcagcggcagggagaagcgtttcattgtctatttccttagggtgaggcagctcggtgttatccatacgcgacatgctatttattaataatcaaactcacaatgattattattatcaataattaatgcgataacagcaagtgctaattctgcggagtgatatacgcgcgcggagagaaaagggcgggtaacgcatcgaagaaacgcccatcccggcaggatgggcgagctattaaaagcggctgtctaccgccgcggcaagtttttccaacaaaacttccgtatcttcccagttcaggcaaggatcggtaatggactgaccatagattaatggttgaccgctgataattttttgcgtgccttcccgtaaaaaactctctgccataatcccggcaattgccgtggagccattacgaatctgctggcaaatatcatcacatacctctaactggcggcgatgctgtttttgacagttgccgtggctgaagtcgacgaccagatgttccggcagatcaaattcatgcaacgtatcgcaggcggcggcaatatcttcagcgtggtagttcggttttttaccgccgcgcatgatgatgtgcccatacgggttgccactcgtctggtagatagtcatctgtccgtctttatccggcgagagaaacatatgactggcgcgggaggcgcgaatagcatcaacggcaatgcgggtattgccatccgtaccatttttaaagccgaccggacaagagagcgcagaagccatttcccgatggatttggctttcggtggtacgcgcgccaatcgctccccaactgatcagatcggcaataaactggccggtgaccatatcaagaaactctgtggcggtcggtactcccagttcgttcacctgcaatagcaagcgacgcgccagttcaagcccataattgacgcggtaactgccattcaagtcgggatcggaaatcaggcctttccatcccacgacggtgcgcggtttttcaaaataggtgcgcatgacgatctccagacgcgcctgatgcttttggcgttgtgcctggagctgcgtcgcgtattccatggcagcattcagatcgtgaatcgaacaggggccaatgacgaccagtagccgtggatcttcaccatttaaaatcttttctatccggcgtcgggagtcggtaacgtgactggcgacggaggacgatacaggataccgctgcgcgagttcggtcggtgttaccaggctgtcgatacgcgcagtacggagttcgtcggttctgttcattacaagtctcagaaatttgttgcttcaacggcaggactaccgggaagtgatgggcatcacgataaaccaatccctgctgatttcaagtgcgaggcgtgtcacacctcgcaggcagaacggcatgataacaaaaaccaacccattaaactagtttgctagtacatcctgcggttaagccccataatatcgagaatcttggtggctatctcttcaacggaataattagtgctgttcaggcaggggatctgattcttacgatacagcgcttcgacctccgccacttccatgcggcactgacgcaacgaggcatagcgactgttttcacggcgttcttcgcgaattgccgccaggcgttcagggtcaattgtcaggccgaacagtttatgttgtagcggttttaacgatgtgggcagcgtcaaattatccatatcatcggcgatgaaagggtagttagccgcacgaataccgaattgcatcgccagatagaggctggtgggcgtttttccacagcgcgaaacgccaagtaaaatgacctgagcctgatcgaggttgcgcaatgaaatgccatcatcatgcgccagggtataatcgatagcggcaatacgggcgtcatacttgttcaggttacccggattaagcccatgagtacgatgagcgatcggcgtcggatccagtttcatctcctgctgaagcggcgccaccagcgcctggacgatatcctggcagaaaccttcgctctgtaagatgatggcgcgaatttcaggtaaaacaatcgagtaaaacaccagcgggcgaacgccggtttgctgataaatggcgtcaatttggtctttgacggcgcgggcgcgactttcgttttccacgaatggcagcgtgatgctgctgatcgtcaccggaaactgcgacataaccgcgtgacccaggacctcggcggtgatggcggtaccatcagaaatatagaaaacatggcgatcaacaacattatccattctgttcatcctgaagagtaaacataattatctgaaagcataaattaaaagtaacgggaaacgtataacttgtcgcttattttataaaatgacagggactttttataattaatgaaaagtgtgtttcatttcctggaaacgcagtttataccgggggttattcagggaatgccgtgctatgcgcgggtttgcgcaactacgtaaacaatctgaaaaaatgaaaaaataaatttgcttgaacgattcaccgtttttttcgcgggtttaagtatgccaggataaatacgcaactatgtgtttcttaaactcgttcatttatcacaaaaggattgttcgatgtccaacaatggctcgtcaccgctggtgctttggtataaccaactcggcatgaatgatgtagacagagttgggggcaaaaatgcctccctgggtgaaatgattactaacctttccggcatgggcgtatccgttccgaatggttttgcaaccactgccgatgcgtttaaccagtttttggatcaaagcggcgtaaaccagcgcatttatgagctgctggataagacagatattgatgatgtctcccagctggcgaaagcgggcgcgcagatccgccagtggattatcgacactcctttccagccggagctggaaaacgccatccgcgatgcctatgcgcagctttcgtcggatgatgaaaatgcctcttttgccgtgcgttcctccgccacggcggaagatatgccagatgcttcgtttgcgggtcaacaggaaacgtttcttaacgttcagggcttcgacgcggtgctggtggcagtgaaacacgtatttgcttctctgtttaacgatcgcgccatctcttatcgcgttcaccagggatatgatcatcgcggcgtagcgctttccgctggcgtgcagcggatggttcgctccgatctcgcctcgtcaggggtgatgttctctatcgataccgaatccggctttgaccaggtggtctttatcacctcggcatggggactgggtgaaatggtggtgcagggcgcggttaacccggatgaattttatgtccataaaccaaccctggcggcaggccgtccggccatcgtacgccgcaccatggggtcgaaaaaaatccgcatggtttacgccgccacccaggagcacggtaagcaagtgaagattgaagatgtgccgcaggaacagcgcgacattttctcgctcaccaacgaagaagtgcaggaactggcgaaacaagcggtgcagattgagcagcactatggtcgtccgatggatatcgaatgggcgaaagacggtcataccggtaagctctttattgtgcaggcacgtccggaaaccgtgcgctctcgtggccaggtgatggagcgttatacgctacatgcgcaggggaaaatcattgccgaaggtcgtgccattggtcatcgtatcggcgcaggtacggtaaaagttattcacgatatcggcgaaatgaaccgtattgagcctggcgatgtgcttgtcaccgatatgaccgacccggactgggaaccgatcatgaaaaaagcggcggcgattgtcactaaccgtggcgggcgcacctgtcacgcggcgattatcgcccgcgaattgggcattccggcggtagtcggctgcggcgacgccaccgaacgcatgaaagatggcgaaaaagtaaccgtctcctgcgcagaaggtgataccggttatgtgtatgccgacatgctggatttcagcgtaaaaagctccagcgtagataccatgccagagctaccgctgaaggtcatgatgaacgtcggcaacccggacagggcatttgactttgcctgcctgccgaatgaaggcgtaggtctggcgcgactggaattcatcattaaccgtatgattggcgttcacccgcgtgcgctgctggagtttgacgaccaggatgccgcgctgcaaaacgacattcgtgagatgatgaaagggttcgactcgccgcgtgaattttacgttggtcgactgacggaagggatcgcgacgttaggcgccgccttctacccgaaacgcgtcatcgttcgcctgtctgactttaagtccaacgaatacgccaacctggtcggcggcgaacgctatgagccgcatgaagaaaacccgatgctgggcttccgcggcgcgggtcgttatgtcgcagaaagtttccgcgattgttttgcgctggaatgcgaagcggtgaaacgcgtgcgcaacgatatgggccttaccaacgtcgaaatcatgatcccgttcgtgcgaacggtcgaccaggcgaaagcggtcatcgaagagctggcgcgccaggggcttaaacgcggcgagaacgggctgaagatcatcatgatgtgcgagatcccgtccaatgccttgctggctgaacagttcctcgagtattttgatggcttctcgattggttctaacgacatgacgcagctggcgctggggctggatcgcgattccggcgtggtgtctgaactgtttgacgagcgtaacgacgcggtgaaagcgctgctgtcgatggcgatccgcgcggcgaaaaaacagggcaaatatgttggaatttgtggtcagggtccgtccgaccatgaagactttgccgcctggctgatggaagaggggatcgacagcctgtcgctgaacccggacaccgtggttcagacctggctgagtctggcggaactgaagaagtagtgtaataccggatggcggcgttaacgtcgccatccggcaatttataccgcagtgtgctcctggcgcagccgctcaataatatcctgccgcaacagaaacttctgcactttgccagaggcggttctgggcagtttttctacgatgacgatccgttccggatatttatacttcgctacccgttttcgactgaaaaaagcgatcacctcttccagcgtcagcgaaaggtgtggcggttttaagactacatacgcgcatgaacgttcgcctaagcgttcatcaggcatagcaacgacgcaagcatcgtgtatgcgggggtgttgcaataaaatatcctccacctcgcgactgctgatattttcacctccacgtataataatatcctttttgcgcccggtaattttgatataaccgtcttcatccatgcggcagaggtcgccgctgtaataccagccctcattatccagtgcgcgggcggtaagttccggctcgtccaggtatcccataaaaacgttcggcccgcgcgaggcttcttcgccttcgtggcctgctggaagcgtattgcgatcttcatccacgattttaatttctacaccggtggcggcataaccatcggtgttcatcatgcgtgaagtcgaatcacccagattaaccatcgagtgtggagaactttctgtagaaccgtaaatactcaataatttgataccgcgctgctggcagtcgcgggcaacctttttgggaatagtcgtgccgccgcataagaagaatcgtagtgaggagaggtcggcaggctgttgctcaatggcacaaagcagatcgtaaataaacggcgtcgcgcctgacatacaggtacagcgttgctgcgctaataaggtaaggcaggcttctggggtaaagatgtccagcaatacgctacgcgccccgattaaaaagggcgcggtgacgccgtgtaaaaatccggtggcgtggcccagtggcgcaggcatcaggaacacatcttgccaggttaaattcaaccgcgcgcaatacgcccgttcgctggcaagaatattattgtgggtcaacatcacccctttcggcattccttctgtgccggaggtaaacagcactgccgccagttcatcaccgtgaatgttaatgtctgactgcaacggttcgctgcggtcgatgatttgactaagcgcaagcgctgtggtggcaggcgccagtttatccacgccgacaatatgcgtcagatggcgcagttgattttgtagcggaaggataagatcgaccggacgattctgtttgaacacggtgggggcgaagaatattttagcctgacatttgttcagcacccaaaccagctctgcttctcgccaggcgggaagtagcgggacagataccgcgcccgttttcaggcaggccagataaatgagggtaaactcacaccagcccggaagctgaaaggccacgcgatcgcccggttgaatcccctgagacagtaaccagtttgccaggcggcttgccgcgtagtcgagcgcggcgtaggtccaggacgcgccatgattatcgaccacggcgattttatcgggtacggcgcgtgcggtttgccgccagtagtcgcccagtgaagcatcgccccagtagccggactcgcgataggttttccgccttgcggcgtcaaacgttaatgtaacactcattgacttgttctctattaatacaaatgacgtaatctccgggggcaagccgaataagacgccgtagcgtcgttatccggtgtttcagagcgtcagccgtagcgaaactcaacgccgaacgttcccgccgggtattcccatttttcgagaagagtattgccgcagagaaccctgcaggtcccgcattccaggcagcccgcggagtcaaaatgaatatttcccgcatcgtccagcttatagagtccggcagggcaggcttttattaatttattaaactcctgcatgtcaggcgaggagcgcaaaatgatatgtgggtgtccttcatctacgtaaaatttatttacgcccaatttgacgtcaacattcaccttattgtccgaactcataatgccgtagccccttttatgccgtcttttaatagattcaccagtccaatttttttcgcatgtgacaggatagttttacgcaacggtgggactggaccgccatcaacggtgaacagatcgcccacaatgtttgccgccatacgcgggtactcggtaaaaagccgtgggttttccattaatccggggagtttgcggaaatgccgcatatcgcgtaacacgccgtttttctccagcgcgcgtttgtaaccggcaagactcgcggcggaaaaatcttgccgcgctttagcgtcaatggcggtttgagcggccgcttgcgcggacgcgatggctaaatccatgccgcggacggtatagccgagattcagacaaagaccggcggcgtcgccgacaatcatcacgccgtcatttgccagctccggcatcattgctatgccgccttcgggcaccatatgagcggagtattcaagcagtgttcccccctgaatcaaagggcgtattgccggatgctgtttaaaatcttccagcatttgcggtacgcttttggtcgcgtgagcaatgtcgcccaggccacataccagccccagagaaaccgaatcgcggttggtataaagaaacccgccgcccatgagcccgttggagggcgcgccagcgaataaccaggcggcgccttcatgggacgccagattaaagcgctcttcaataagtgccggagagagcccaatcaactcttttacgccgactgcatagtgatgcgcagaagagacaggcaccatgtccagcgaacggcccagcatggaattcacgccgtccgcgagaatcacaatattcgcatccagaatatcatccccggcctgaacgccagtgaggcgattgccttcacgtaccagagcgtcgacccgtacacctgggataaactgcgcgccagcctgttccgcctgcgccattaaccacgggtccagtttgttgcgcagtacggtatatgacgtaaggggcggagtagggggcgcgcggtgaaaatcaagtgtgacggcgctttcttcggttaaaaaggagattttttcacgggtaacgacgcgttcgatgggggcggacgttgcgaatcccggcataatactttcgatactgtgagcgtagagccggccaccggtcatatttttgctgcccgcgctgtttccgcgttcaataaccagtacatccagtcccgcttttgccatcacatacgcggcgaccgttcctgctacgcctgcgcccaccacaatagcgtcaaatttatcatccgacatgctttatgctcctttcccgccgtatcgacgacgggagatgtgcgttgaaaaaggaattagcggcttaactggtcgatgagggcaggaacaaccttatagatatcgcccaccaggccataatcggcataattgaaaatgggcgcgtttttatctttgttaattgcgacaataatttttgcgccgtttccacccaccatatgttgaatttggccggaaatgcccagcgtcagatagagatcggatttcaacagaacgccggatacgccaatataacgctcacgttccatccagttttcaccttccgcaatggggcgggaacagcccacttctgcgccgaggacggtcgccagtttatgcaccatatccagatcgctttgcgccgccagacctcgtcctacgccgatgacccgtttggctttgctcaaatcgacgctgcttaacgatttcgcgcgccgctgctggcacaatacctcgtggcgtggggcaatatatgccagcgtggtctgcgggcaagtatgaccggggagaggggcggcgggttccagtacgccgggtgccagcgtaataatcgcctgcggactgtttaatttctctttgccgaaagcaagtccgccgtacatgcgatgctctgcgtgtagcgtcccgtcgaggaggtcaatagacgtcgcgtcgttcaccatcacggcgtcaagctggatgctcagccgggcgcccagcgctttacagcgcttggtcgccgccatgagcagcagcccattttggtcgcctaataacgaggccagcgtttcggcatagttttccacgcgctgcaaatccgtatgcgattcaagaatgactatctcatcagcgccaagcgctttcacgtagtcgatatccgtgtttccttgcacgatggcgtaaactttttctccccactgccgcgcgccggtcattaattcggcataacgctctacgttatcgctaaatacccatacgttagctaaatgattcatgataatttttctccgttgggcttagttcagggattttttcaaatggtcggccagtgcggtaatgacttccggcgaatcgttatcgagaatgatatgcttgcgttctgtctgcggcggtaccgagatggcgaccagttccgccattggcgtggttggggtccagtggatatcgctcgccagccacgacgtaacggcttttttcccggcgccgagaatggctttcattgacgggatgcgtggaacgttaatatctgaggtcacgcaaagcaccgcgggcagcgtgagctcgataatttcaacgtcttcttccagtgtgagttcaacgatgattttgtcgccgtcgcgttgaatatggcttactgcgttgatgacggggagtttcaggagttcgccagtcagcaggcccacctgttgggcataaatatcgccggagccctctccaaagagcaacaggtcaaagccgattttctccgccgcggatgctagcgccagcgcggtttctttgggcagggcgtgctccatttgcgcatcctgaaccatgaaaagcgcatctggcccgcgggataacacatctttgcggacttttgaattttgtaacagagagccgccgacggtgagcgcggcgatctcgtcgccaccgccagctaactgcgcggcggcctcaattgcatttaaatcaaactggctgattttggcctcggcacgatcaaaattgagcgaatgctccggggtcacggtaatgtcctgttcttcaggcaccaacttaaagcaggttattattttcattgcatctccagtgagtcgcgtgcggataagtaacgtaaatctgactgaaaatagtctgcggcagtctgaagaggtttacgatgggtcaatctgttttccttgccaacaatcttgcacaaaaaatctgcgaacagagaatcgttagcaaccatctgaaaagggcgtcataaaaatataaatacggtagtgagaataataagtgcgaagcatatcatcattttttaacatgaaacgtgcgatgttgtttctgtgaggttaaaagaaaacatcaaagatatgtcggctatgtatttttgtctgataatacgctatcgacaggtaatctgagctgtctgcaaaagaacataatatcttgcattcggaacgaataatcttgttttgctggtaatctccacggttgtacaacactgacgctcgctttattttatcctggttatctttttaaacctgacagaggttattatgtatcagcgctgttttgactccgccgcggagacgatttttgaacaggacaagacccctcgattttcacgttttgtcattagcgatgatccaaactgggagtctggccatcatatgcatgataatgaaacagagcttatttacgtcaaaaaagggatagccaggttaattattgactcttcactctacgtcgcgcatgcggacgatattgtcgtcgttgagcgggggcggctacacgctgtagcatccgacagcaattcgccggctaccacctatacctgtgcgctgtatgggttttgttttccaggttgggaagaaaaccaactattgcagagtcattcctgtccggtggtttccgtggttcagggaaaaggggtcattaaaagtatctttaatgaattaagcgtgttacttccgcaggggaaaaacgtattggcttcctctgtatacgatgcatttgcttacactctgaccgcactttactatgaaaattttaaaaacgcctatcgttctgaacaaggttacattaaaaaagatgtattaattaaggatgtacttgtttatctcaataataattatcgtgagaaaatcacgcttgaccagctatcgaaaaaatttcgcgccagcgtcagttatatatgccatgaatttgccaaagaatatcatatatcccctatcaactatgttattcaacgacgtatgaccgaggccaagtttgcgctgacaaacactgagtcgccactggcagaaatttcatggcgggtaggatatgaaaatgtggaccattttgccaaattgtttatgcggcatgtaggatgttctcccaacgattatcgtaagcaatttaaaaatagtctggttgagcaggcgtatttgctgccaaatacctgacggcgaaatatatctgatttattcggcctgatgccgtaaagcagtcaggccgaataagacgttccggtacgatccttacttgttctgatagtctttcagaatctggcgtcctgccacatagatcataatttcatccgtgccgccaccgatacgttcgcagcgaacatcgcgccagaagcgggagacacgggcttcgtcagtataaccaagcccacccataatctgaatcgcatcgtcaatcacttccatcgctgtgcgtgcgcagtacagcttagccagcgcggcgctggtacgcagtgactcttcccgatcggcctgccaggcgactttcaacaccatattgcgcatgttttcgattttgatggccattaacgccagcttttcctggatcatctggttatggccgatgggtttaccaaaggcgatacgctggttggcgtaacgggcggcatcttcaaatgcgcattcggcgaaacctgtactgcgcgccgcattaatcaaacgctccatctcaaaattgtacatgacattgaggaaacccatgccttcttcaccgacccggtcgctttcgtccacctcgacattatcgagataaacttcgcatgtactcaacatgtgccagccaattttgtgcagcggattaatctttatgcccggtttatttgagtccacccaccaaagcgtgaacgcttttttaggatcttttggctccgtatcgcgcgccagaaccagcatgtaaggatattcttttgcaccggtgataaatgttttttggccgttaagataaaccttgccgtttttacgcgtccaggttgttgtggcgctattattatcagagcccgcgccaggttctgttaaggctagcgcatatgctggatcgccggtggccagagtactttctgctgttttacgcagttgttctgcggaaccaaaacggcgcatactgtgaatgcattggccgttggtaatcaaaaaggccggagcgccgcattttgagatttccatcagcgccagcatttgcgttacatagtcagccggaatgccgccgaattcttccgggacgcccagcatcgaaataccgttttccgccagcgcctgcataaattctttgggataggtgcccgtttgatcgcaggtacggaaatactcttccggaaaattgctggtgattaactcgcgaatactggccagtaatagttcttgttcttcagttaatgaaaaatccatatttgtactccttttaatgtgttgcgtcaggaagcgtgaatcccatagtgctatcggtaaataatcttgtgtccatcagttttaaatctggtgagataaccggtgaaaaatccatcttgtcaagaatatcccgttgcagatcgacgccaggcgcaatttcaattaaatgcaggccatcttgtttgagagtgaaaaccgcacgttcagtgatgtaacgcacgtctaacccgcgctcaagcgcaatttttccactgaacgtaatttccggcagttcgctgacgaattttttcacgcgaccttcctgcagaatatttaatttgccatcggtaatttcagtttttaaacttccggccgtcagagtttcgcagaaaataattttttgcgacgttgcgctaatatcgataaacccgccggtgcccataattttgccgttgaatttatgtacaccgacattaccgtgttgatccacttcggcaaaacttaaatagcagacatcgagcccaccgccgtgataaaaatcaaattgtgaggtcatatcaaggatcgcgcgggtgttgacattagcgccgaaggccacgccctgagaggtaataccgcccaccgggccagtttctacggtcagcacgaagtcatcggcgcagccttcctcgcgagcgaccagaccaataccgtcggcaatgcctacgcccacattgcctaccgcgcctttacgcatttcaaacagcgcgcgtcgggctaccagcttgcgctgattaaggggtagggtaagctgcgtactatcatcaagagtgaaatccccggagataaatcggttcaccggcgcgccgccatagagttgcgtctggtcggcgtcgacaaccacaatatccaccagatagccgggaatacgcacggattttggatgcagcgtggctttttttaccattttctgcacctgcatcattacaataccgccattattgtgaacggcctgggcgatcaccagcgcatcaagatacatcacctcatcttcaaatgatgcatagccttcgctgtcgcaggtggtggcgcggataaaagccacattaggcgctatcgctttataatagagatattctttattatcgatctctaccagcttaatgagatcttctttagtcacgtcgtttaattttccgccctgttggcgagggtcgacaaaggtaccaataccgatatcgctcagaatacccggctggtgtgcggcgctggcgcgcagcgtctgggttaatacgccttgtgggtagttataggcggcgattttattttgttcagccagttcagaaatacggggagattgcccccaatgtccgcatagcgcccattttaccagtccctcctgcgccagcgggctgatgccgcgatcggcgcggtcacctaatccggtagggctaataatagataaatctcgtggtgactgggttgtttgatatttatctgccagtgcggtaattaatgttgtcgcttcgagaataccgccgcctgcgcccagaatacataaagtggcctcatctggaatataatttactgcttcttgtgcagagagcacgggaacgcggccattaatgcgtgatggcttattgattttcatatttactccactattatccctgaaaacaatatcgatataaccgtgttaaggtaataaagacagcggctttcaatgaatatggaacatattcatgtcagataactatttattttattgtggcagaaagagaatattccgccacacgataaagtattacgcctggtgcaatatagttaatacggtacgcagatcggctaccgatatttgtcccggcgcagatgcttttttcaccgcgccaaacgttgccgcagaaccgaacacttcgccggcaagacgagatattaccccggttttcgacatcgacatggtaataatcggacgatccgcatagcgctcctgcatttctacagtggcggtaagtaaggtcaggacatcggctttagtctgtggcatgacggcgatcttcggaatatcagcgcccagttcctgcattttacgcagacgctgaacaatctcttccgctgcgggcgttttatgaaaatcatggttagacatgatcaccgcaacattgtgttgatgagcatagccgacggtggctttcacctcatcgtcgccggtaaaaagctcaagatcgatcatatcgaccagaccgctgtcaaccgctgcacgattcagatcgatatactgtccggtggttagcgcctgttcgccgccttctttcgcgctgcggaaggtaaatagcaagggtttatcggtaataatctcccggatggcgccggcggcctcaagtacgctttccgccgttgtcacgttggcaaaatggtcaacgcgccactccagaatatcgaaatccgcttcacggtaggcgagtgcttccgatttcacatcggtaatggtttttcccattagcgacacaatgatctttggcgcgccttcgccaaccacgagatctcttacagttacggttttcatttggtacccttcattgtcattcgtcgcaattataattttaccggtcaggctgtgaatcccatcacctgctttacatagtccaatggaaacgcttttcctgtccacagttcaaactgttcggctccttgccataacaacatgccgtaaccatcaattgttttgcaaccagcttgttgcgcctgctgcaataactttgtcatatgcggattataaacacattcggtgaccagcaattcagggcggagcagggaaacatcgccgatcagggattcgttctccaatggtttcatgccaactttggtgccgttcgtcagaatatctgcgctggcaagcgcttcagtaaaagcgtgctgatcggcaagatcggtgacggtaacgacacaatcagtgttttcattcacccgcttcgcaaaggcaaccgctttttcgaaaaagtcatctttacggttaaacagtttaatttccttaatgccttcaatagctgcctgggcgccaatggcggtagccgcgcctcccgcgccgagcagcaccatggtttttccccgcatatcgaaaccgctttctttaattgcccgaatatggcccgtaccatccgtgttgtagccgcgtagatagccgtcatcgttaacaatggtgttgatagcgccaaccagttttgctgctggcgttaattcatcgacatactcacacgcgagctgtttgtttggcatggagacgcccgtaccgcgcatttttaatgctttcagtccttcaatggcgctggcaaacgtcgtgttatccacttcgaaagccatataggtatacggtagccccgctttttctaacgctttgttttgcatttcgggcgataagctatgacggataggatacgccataagaccaattaattcatattttgcggtaacatccattttatactccttaataagtggacagtgcagagcagggcgcatgcctgttgcgcatcgttaacatttttactggaaataatgctcgccaaatcggacatcgttttgcgggatcttaaatacgcgataatagcgaataaatacaataatggcggtgataaatgtcagtagtgcaaaggcaaaatctaacaaaatgatatattgcaggccaatagtagagagataaccggtaatcagtgggataagaaagttagctacgccccccatcatcatatatatactggtgactttagctttactcttagggaaaaattccgacattaccgatacgcctaattgtaaaatacctccagcagcggaaaaaccaatcacgaaggcgccagcattacagatcagtggagagggatacaggtaaattgccgcagcggtgattgtcgccagcccggcattgaaaacattggcccagatggggcgaaccatttttttcagcaatgcggcaaaaataaacacgcaaaccaacgatcccatactgtaataagagatggttttcagcgcgtcggattccgccattccggcgaaggccatcgcatatttaggcatccagaccacaatcacatagaaggttgagaacgcggcgacgccaaataaaacggaagctacgccttccagccagacgaggggagtactgttcatctggggtaattctttcgcaatactggcatcgacaagttggctgggaaaacggcttttcaacagcatcaacgtgatgaggacgaaaaggataccggggattaccaccgcgtagccgtaccagatatggttgactagcaaggcgctgacgataaggggataaatcatttgcccaaaagagaccatcgctttaaccagaataactgccgagcccgatgctttgggaaaacactccattaatgcagggtatccgccggtatccagcgcggagttcgccacgccgacacacaccgctaatatgaaagcgatcatcaggttaggactggcgggaataccgaagaaaaacagcatatatagtacggcgccaagcagtattattgcccgacggccaaatttatcggacagtacgccaaagaataaaatactgaccagacgaccaagaccaatgccagagattaaataggcaataccggcactatccgtggagaatttctgtgcaagggaggtcatgttctgggctagtgtaataacactcatgccgtggagaaagtaactaaaataaatgcagataacagccagcaaatatggcatgttgcgagccttgttctgagacatttgttcacagctccttgctgatggtttgattcaatgtcctgcttattactgctttactacatgcagcgattgttcagtaacactataagtcggtactgtcgttatatgtacataacatggcgtttaaaatgccaggtttattgcattgatagcatttcatttgttagccaggaaatataaaaattgctgcgaatttgttgtttaatacatataactcgtgatgctcatcgcaatttttctgataagtgtgaagataatgaataataattaacacgaaaattacattttttgtttcccggtgataatggctaacgttttattttgcatagcaaggcaataatattgcaactggcacgctaacatttattgcgcggttgacgctgcttcagcgtgatgttgtgattcagcccgacttcggtaaccgatgaacagtgcgaggagaaatcccactgcggcgataccggtatcaaaccacataatatgtgcaatgctcatttctgaaatccgcgctgtgatcaacggaatagtgaacgtcgcgatactgccggcgctgtaataaataccggtcgctttacctttctcctgtggaaaacgggacgccatcagcgtcaggccgatttgtactacgccaccggcggaagagaatccaatgacgaatgcgaagatcataacaatataggtctgaggatgcaggcagaccgtcagaagcgcaataaaagagataaaggtataaaacatcaataatgtggtagagcgaattgtttttctgaccagcggggcggtaataaaaacgcagagtagcgatccgcaggtataaatacttaacagtttgatggattgggtatacgacattcctgcgacgaactgtccatactgcgccagccactggctgataagataaaaggttgccatcgagatatagccataaagggtgtagctgataagatcgatgagggagcaatgatgtacgcctgtgactggcgcttgcgagattttgggcttcaatatccgaccaggatagggtggaaaagggcagcgtaataaaaacagagcattaataagcatgatcgccccggcaagcaggaaggaccagccaaaccacatattagcccagactaataaactgataataatgggcaacaagaattgcccgccagagacaaatgctttgatcagaatatttgccgtactgggggagcgagggaaggcttccatcaaactgggataggtacctgcatctaaaaaactgttggccatacccgctaaaaagccacaggcataagcgacaaaaatcgtctgagcataaagaatgccaatgaaaaaaatcaggtaacaggtggtccccagaatgataaaaggacggcgaccaaagcgatcggaaagcataccggcgattaacaaaacgcttagccggccaataccaagcgaagagatcacaatagatacgcctgcggcactggtatgccattgctgttcaagcgatgacatgttcaggctcatcaggataacccccatgccatgtacaaagtaattaaaatacaaccctacagcggtagggaaataacgatttttcatattatctgactcagagatgccgcctgaacgttacagtggtatacacaggcaggaagcatattggatagggtgacaagtcaatgtcgtgattgtgtggctttctatccggtatcaatacgatgcggcgataaagtttacgtctaacacagccgctccagatcatgtgcgaaaagttcggcagcaacagattgataaattttccactcgataaaatccccctctgtataaatggactgaaaagaagataaatcagggaagtaacgcattgtattattgccgatgcggttatttattttgtcaacaatggcgttaattcgtcgctgtctcctggctttcatttcctttagcctggcaatgatttctggagagatgggtatgtcgccagcttcccatcgttgccaggttgccgaattattatcctgggtgatatagattgtgcattcttcaatcgtcatatcaaaaatacgccgtagtgcttgtagttctaacgcgttcatcattttttaggcttttatatgaaaaaagtgatgctataaatagcaccaccgacaccgtttcgacttgaacagaatcacactattttgtgcaatattatttgttcgttgcagatatcgcggtgttgaaggaaaacgggagctggcttatgtaacaatgcggcgaaaaaagttaaaaaaaaagcccatcgtaggagacgggcaaagactacacacagcaattcgttgtttcactcaggggatttccatgcttataaatcaatgtgttgatttataaccgtgtgctaatagtaggcatgagcactttttgcgtcgatcagattcgtctcaatagtttaaaaactgtaacggatttgcgacagaaatgagatgcggcggggaacagacgggcgaatcaaaatggagtgtgcgttgaattgataaacgtcgctaaagcatcgggcggcaatgccgcccgacgggattatgactgcttgttggcttcctcgatatcatccagctcttcaaggatctcctctggttcattcgtcggcgccggaacttcatgtacccatgcggagaacaaacgccaggtcacggccagaagcaccggtccaataaacagaccaatcataccgaatgcaatcaggccgccgattaccccggaaaggatcagaagcagcggtaaatcggcgcccatgcggatgagtaccgggcgaatcacgttatccagagtgccgacgacggcgctccaaaccagcagcacggtgccccaggtggtgtcgcctgtccagtaaagccagataatggctggaatcaataccggcaacggccccaactgaaccagacacgaaaggatcatcactaccgtcaacagagtagcgtaaggcacgccggaaatcgccagcccgacgccgccaagtaccgcctgtaccagcgcggtgaccaccacgccaagcgccacggcgcggatcgcctgggcagccagcagaaccgccgcatcgccgcgtttagccgcgagacgacaggcaaaatggcgtatacccatcgccacttgttcgccgcgccagtaaagcagggcgctaaacaacagcatcagggcgcagtgcatcataaagcgtccgatatgcgccgcctgaccgacaaaccaggtcgtggttgtgccgatataaggccgcactttcgccataatagcgctaccgcccatatccagcaggctatgccatccggcatacagtttggcgccaaccaacggaatattatttaaccatgccagatcgggtagcgtcatatcgccgccggtcactgcatggatgagcgggccgctaccatcgacaatgctgttcaccagcaaggcgacgggaataacgaagagcagcactaacagcagcgtcatgaccagtacggcaagcgagcggcggccccacaatattttttgtaatttcagcaaaacgggccaggtcgcgataacaatcgtacctgcccatgcaaaccccaaaataaaaggctgtactatccacaaacaggccacaatcatgatggctaaaaacagcaccgatagcagcacttgcgcaatatccctgggctgacgaacatttaccataaatacttttcacctttgtctttgcgccagaacgttggcgcgacgtgaacatgcaaaccacaccctataatgatgagcaatttcagcggtttttaacaggccgattctgcatgtaattctgttgggcgcacaggaaaaaaatgtgatacaacaaataacgcaacacgcaaacgattaagcatcccttcctgtgcgtagaccgctcgcgctcgccgggttgggcgccaccgttcacaacatagaccgcaggaaaaggtcaatataatgattccacaaatttctcaggcacccggcgtcgttcagctggtgctcaattttttgcaggcgctggagcagcaagggtttacgggcgatacggcaaccagctatgccgaccgtctgacaatgtcgaccgataacagtatctaccagcttcttcccgatgctgttgtgtttccccgttctacggcagatgtcgcgcttcttgcccgtctggcggcggagccgcgctttacgtcgctgatatttacccctcgaggcggcggtactggcacgaatggccaggcgctaaaccagggcattattgttgatatgtcccgctatatgaaccgcattattgaaattaatcctgaagagggatgggtgcgggtagaggcgggagtgataaaagatcagcttaatcaagcgttaaagccgtatggctatttttttgcgccggaactttccaccagtaatcgcgccacgcttggcggtatgattaataccgatgcctccggtcagggttcgctggtctatggaaaaacgtcagatcacgtcttaggcatacgggccgtattgttggggggcgatatccttgacacgcaatcgatgcccgtagagcttgcccggacgctgggtgaaaacacgacgacgccaggccgcatctatcagaccgtctatcagtcctgcctggaaaaccgccaacttatcctcgatagctttccaaagctcaatcgcttcctgacaggctacgatttacgccacgtctttaacgatgacatgacccgcttcgatctcacccgcatcttaacggggtcggaagggacgctggcgtttattactgaagcccggctggatattaccccgatacccaaagtccgccgtctggtgaatgtaaaatacgactcctttgattccgcgctgcgtaacgccccttttatggttgatgcgcgcgccttatccgtcgagacggtcgattccaaagtccttaacctcgcgcgggaagatattgtctggcactccgttagcgaattgattaccgatgtgccggataaagagatgcttggcctgaatatcgtggaattcgcgggtgacgatgaagcgcttattgacggacaggtcgaggcgctgtgccaccggctggatggcctgatggcgcgagcggaagcgggcgtgatcggctggcaactttgtaccgatttgacgggtattgagcgtatttacgcgatgcgtaaaaaagcggtagggctgctgggtaatgcgaaaggcgctgccaaaccgattcctttcgcggaagatacctgcgtgccgcctgaacatctggccgattacatcgccgaatttcgcgctctgctggatggtcatggcttaagttacggcatgttcggccacgtggatgccggggtgctgcatgtgcgtccggcgctggatatgtgcgatccgcagcaggaactgttgatgaaacagatctccgatgaggtcgtcgcgctgaccgccagatacggtgggctgttgtggggcgagcatggaaaaggttttcgtgcggaatacagcccggcctttttcggcgaagttctgtatggcgagctgcgcaaaataaaagcggcttttgatccgcataatcgacttaacccgggtaaaatctgtccgccgcaagggatagaggcgccgatgatgaaggtggatgcggtaaaacgcggcacctgggatcggcaaatcccgctggcagtgcggcagacctggcgcggcgctatggagtgtaatggtaacggcctgtgctttaatttcgatgcgaaaagcccaatgtgcccgtcgatgaaaattagccttaaccggatccactcgccgaaagggcgggcgacgctggtgcgggaatggctccgtctattggccgatcgcggcgtcgatccgttgaagctggaaaaggagttgccagaaaaacgcgccagcttacgcacgctgattgcccgcacccggaatagttggcacaaacgcaaaggcgagtatgacttttcccatgaagttaaagaggccatgtccggctgtctggcgtgtaaagcctgtacgacccagtgtccgattaaaatcgatgttccggagtttcgttcacgtttcttacagctttaccatacgcgttatctgcgcccggtacgcgatcatctggtggcgacggtcgagacctacgcgccgctgatggcgcgtgcgccaaagacctttaacttttttattaaccaaccggtggttcgtaatctggcgaaaaaacatatcggtatggtggatttacctctgctttctgccccttcattgcaacagcaactggtgggccatccgtctgccaatatgacgcttgagcaactggaacgcatgagcgccgagcaaaaagcgaaaacggtactggtggttcaggatccgtttaccagctactacgacgcccgggtcgtggcggactttatccgcctggcggaaaaactgggcaggaggccggtattgttaccgttctcgccgaatggtaaggcgcagcatattaaaggttttcttaatcgctttgcgaaaacggcgaaaaaaacctctgagttccttaatcggatcgccgcgttggggatgccgatggtgggtgtcgatccggcactggtgctgtgttatcgcgacgaatacaaactggcgctgggcgaacagcgcggcgattttcatgtgttgctggtgcatgaatggctggcgcaggaaataaatgcaagactgtccgtcgaggtgagcggcgaaccgtggtacttttttggtcattgtacggaagtcacggctttacccggcgcgcctgcgcagtgggccgccatctttgcccattttggcgcgaagctggaaaatgtcagcgtaggctgctgcggtatggcgggcacttatggacatgaactcaccaatcataaaaattcgctgggaatttatgagctatcctggcatcaggcgatgcaacgtttaccgcgaaaccgttgcctggcaaccggttattcctgccgaagccaggttaaacgcattgaaggtacgggcgtgcgtcacccgttgcaggcattactggagattataggttgatctggaaacgtgaagtgaccctcgatgcgcttaatgcgatgggggaagggaatatggttggcctgcttgatatccgctttgagcgtattggggacgatacgctggaagcgacaatgcccgtcgatcatcgcaccaaacagccgttcggcttgctgcatggcggagcgtctgtggtgctggcggaaagtatcggctcggtcgcaggttatctgtgtacgcagggggagcaaaaggtggtggggctggaggtgaatgccaaccatgtacggtcggcgcgtcaggggcgcgtacgaggcgtctgtaaagcgttgcataccggggctcgccatcaggtctggcagatagagatctttgatgaacagggacgtctgtgctgttcttcgcgtcttactacagcgattgtgtgacgttgtcaccataaaagtgtgatgcatattgcttttggtcaaaatgtgcgcagaaaaaggtgatatactgtgcacgtttacacataagcgaggatgatatgtctactgatttggacccaacccaactggcgattgaatttttacgccgtgataaaaccgaactttctcccgcgcagtatttgaagcgtttaaaacagctggagttagagtttgccgatctcctcaccctctcagcaaccgaactgaaagaagagatctatttcgcctggcggttgggcgtgcattaataaagtctgtgtaggccggataaggcgttagccgccatccggctatgttaccaggcaatctcaccagaccttgtccccaggtaatagataacccccttgattttgtttaaaaaaaatacagatcgccatttgtgctaaaaaggcgcgctctctttatgagattattcttatgccccttcaagagctaagccattaagagtgccggagataagcgccggatggggccggaacccttaagcctgtattgaacagacttaagggtttttcttttccgggcgcgtaaaaaactaaggtctgtcaataaccgccggcatgtcgtcagccgtatgattattcaaaatacggttagccagcacccctgacatcatcgatccgttaacgttcagtgccgtgcgggccatatcaacgataggttcgatggcaataaaaataccgaccagcgcaacgggaaaattcaacgtcgacaggacaatcagcgccgcgaacgtaccaccgccgccgacgccggctacgccaatagaccctagcgcaatggcaggcaacatcgcggccagaaaatgcagcgagagcggatcgatgccgatggtgggcgcaatcatcgctaccataatagccggataaatcccggcgcagccattttgccccatactggagccaaacgaggcggaaatattggcaatggtgctttgtacgccaaatttttcctgggcggaaatggccagcgggatagaggctgcgctgctgcgggaaacaaacgcaaaggttaagacgggccagaccattctgaaataacgcgctggattattaccgctgaggatcagcaagatggcatgcacgataaacatcataaaaatcgcgatgtaacaggcaccgataaaaccaagtaagctggcgaattgttcaaggcggtatgatgaaaatacggtggtcattaatgccatgacgccatagggcgttaatgcaataacgatacgtaccatcttcatgacccatatctgaatagcgttaatgcctgcgcttaatttctgaccttcttccggcgcctcttttttgacctttaacagagcgatccccgctattagcgtgaagataacgatgccgataacggaaacacttctggctcccgtaagatcaagaaaaatattagtcggaatcagcgatgtcactaactggggaatcgacaccgcggcagtcttattgacttcttccgtagttaacattgacggcatgtgcacaaaagcgctggcgtcaagccccagcacatgagcggtcagtaatccgataaaaccggcaaccatcaccaggcataacatgcatccgacgatcgtcagcgacatttttccgatgccggcactattttccagtttattgatggcggaaagaatagaaataaaaattagcggtatagcgaccagttttagcaggtggacgtaaccattgccgacgatgctgtaccattcgataatagttttagtgtgatttgctgaaataaaatgcagggataaaccaataacagcccctaaaaagatagcgataaaaacgcttttcgacagggaatcgcttttttgattaattctcaagatgacccacgagaaaaccaaaaaaagtgcgatatacgcgagcgtaacaaccatattttaagcctcttgcctcattcagcacctgaaatgccggaaagagtttacataaacctatagctcaaactgagttatagaaccgcagcggattataaagagcgcaacgccaggtatccatacaaaaaatggggttctgacctcgccgcccggcaatgtcgacagcctattaattaaatagtcattttctatacatcttttcgtttttgacctgtcagaacggttaatatcttataaatcattacttatcaaaaagttaagttgttttttgtctgtcgtatgacctggcggacagggtctatgcttaataaaaggcgctcaatatgaccatttgttggaaagcccctgcggttaaggggttgaagtgataatcattatcactaacatgctgttatatcctggtgatttagaacgcgaggtaactctatggaattgcattcagacacgtttaacccggaggacttcccctggcaagggctgacgctaacgccagcggcggcagcgcacatacgtgaactggcagaaaagcagccgggcatgttgggcgtgcggttaagcgtaaaacagacgggatgtgccggatttggctatgttctggataccgttcgggagccggataaagacgatctggtttttgaagccgaaggcgcaaagcttttcgcaccgttacaggcgatgccttttattgacggaacagaagtggattacgtacaggaagggctgaaccagttatttaaatttcataaccccaaagcccagaatgaatgcggctgcggcgaaagttttggggtataggcggtactatgtctcgtaacactgaagcaacggaagaggtcggcatctggacaggcggacgccttaattacaaagaaggatttttcacgcaactacccactgatgaactggcaaaaggcatcagcgaagaggtggtgcgcgcgatttccgcaaagcgtaacgaacctgagtggatgctggaatttcgtctcaatgcctatagagcctggctggacatggatgaaccgcactggctgaaagcgcactacgataaattgaactatcaggactacagctattactctgcgccatcatgcggaaactgcgacgatagctgcgtttcccagccgggagccgtacagcaaacgggcgcgaatacctttttgagtaaagaggttgaagacgccttcgagcagcttggcgttccggttcgcgaagggaaagaggtcgccgtcgatgcgatttttgactcggtctccgtagcgaccacataccgtgaaaaactggcggaacagggcattattttctgttcttttggcgaagcgatacacgatcaccctgacctggtcaggaaatatcttggcaccgtcgtgccggggaacgataacttttttgccgcgctgaatgcggcagtcgcttccgatgggacatttatctatgttcccaaaggcgtgcgttgcccgatggagttatccacctattttcgcattaacgccgagaaaaccggtcagtttgagcgcacgattctggtggcggatgaaggcagctatgtgagttatatcgaaggctgctccgcgcccgtacgcgacagttatcagctccacgccgcggtagtggaagtcatcatccataaagatgctgaagtaaaatattccaccgtacaaaactggttcccgggcgacaacaacacgggcggcattctgaactttgtgaccaagcgggcgttgtgcgaaggggaaaacagcaagatgtcgtggacccagtcggaaaccggttcggcgattacctggaaatacccgagctgcattctgcgcggtgataattctatcggcgagttctattccgttgcgctgaccagtggacatcagcaggctgacaccggcaccaaaatgatccatatcggtaaaaacacgcgctcaaccattatctcaaaaggcatttccgccggccacagccagaacagctaccgtgggctggtaaaaattatgccgacggcaaccaacgcccgaaatttcacccaatgcgactccatgttgattggcgcggactgcggcgcgcatacgttcccgtatgttgaatgccgcaataacagcgcgcagctggagcacgaggcgacaacatcacgcatcggtgaagatcagcttttctattgtctgcaacgcggcatcagcgaagaagacgctatttcgatgatcgtcaacggtttctgcaaagacgttttctcggaactgccgctggagtttgccgttgaagcgcaaaaactgctggcgattagccttgagcacagcgtcggttaatgatgaaggaaaaaccatgttaagcattaaagatttacaggtcagtgtggaagaaaaagcgattttgcgtggcctgaatctggagattcgccccggcgaagttcatgccattatggggccgaacggttccgggaaaagcacgctctccgccaccctggcgggacgtgaagattatgaggtcaccggcggctcggttacgttcaaaggtaaagatctgcttgaactgtcgccggaggaacgggcgggtgaagggatttttatggccttccagtacccggtagaaatccccggcgtcagtaaccagtttttcctgcaaaccgcgctgaatgccgtgcgcgcctaccgcgggcaggcgtcgttggatcgctttgattttcaggatctgatggaagaaaagatcgcattgctgaaaatgccggaagatttactgacccgttcggtaaacgtcggtttttccggcggggagaaaaagcgcaatgatattttgcaaatggcggtgctggagccggaactgtgcatccttgatgagtcggactccggactggatatcgatgcgttgaaaattgtggcggaaggcgtcaacgcgttacgcgacgataaacgcgcttttattatcgtgacccactatcagcgcatactggactacatcaagcccgattacgtccacgtcctctatcaggggcgaattgtccgttccggcgattttactctggtcaaacaactggaggagcagggttatggctggcttaccgaacagcagtaaagcgctacagcaatggcaacatctctttgaagaaaaaggagaaagtcgaactgagcaggcaagacaacatttacaacagatgttacgtctgggattgccgacgcgtaaacatgaagactggaaatacacgccgctggagggcttaacccatagccagtttatccagcagtgtgcgactatcagcgccgcacagcgtgatgcgttggcgctgcaaatcgatgccgtgcgactggtgtttgtcgatggtcggtttatgccagagctcagtgatagcacgcaaaacagcggatttgacgttagcgtcagggatgagcgccaggcgcttgccgcgccggtgcagcctgaggtttttctgcatctgacggaaagcctggcgcaatgtgtcacgtatatacaggtacggcgaaatcagcgtccgacgaggccgctactgttaatgcatatcacgcagggtgtggatggcgacgagctgaataccgcgcattatcgccaccatctggcgctggcggaaggcgcggaagcgacggttattgagcattatgtcagccttacagcggcaaaacattttaccggcgcgcgtctgacgatgaacgttgcagacaatgcgcaactgcgccatttcaaactggcgtttgaaaatgcgtccagctatcactttgcgcataacgatcttctgctggcgacagacgcctcggcgtttagccacagttttctgctgggcgccgcagtactacgtcaccacagcagctcacaactgaatggtgaaaacgcgacgcttcgactgaatagtctggcgatgccggtgaaaaatgaagtctgcgatacgcggacatggctggaacataacaaaggctactgtaacagccgccagttgcacaagaccatcgtcagcgacaaaggacgcgcggtctttaatggcctgattaacgtggcgcaacacgccattaaaaccgacggtcagatgaccaataataacctgttgttggggaaactggccgaagtcgataccaaaccgcaattagagatctatgccgatgacgtgaagtgcagccacggcgcgacgatcgggcgtattgacgatgagcagatgttttatctgcaatcacgcggcatcaggcagcaggaggcgcggcacatgattctttacgcgtttgccgcagagttaacggaagctatccatgatagcgcccttaaacagcaggtgctggcgcgaatcggccagcgactgcccggaggcctggtatgacatttcctgtagaaaaagtacgggcggattttcccatactgcagcgtgaagttaacggcctgccgctggcttacctggacagcgcagccagcgctcaaaaacctaatcaggtgattgatgctgaatctgccttctaccgtcacggctatgctgcggtacatcggggtatccatacgttaagcgcgcaggcgaccgaaagcatggagaatgtgcgtaagcaggcgtcgcggtttattaacgcccgctccgcagaagaactggtgttcgtgcgcggtacgacggagggcattaaccttgtcgccaacagttggggaacggaaaatattcgcgccggggataacattatcatcagcgagatggagcatcacgccaacatcgttccctggcagatgctgtgcgagcgcaaaggcgctgaactgcgcgtgatcccattgcatcctgacggtacgctgcggctggagaccttagctgcgctgttcgatgaccggacccgactactggccattacccacgtttccaatgtgctggggacggaaaacccactgccggacatgattgcgctggcgcgccagcatggggcgaaagtgctggtggatggcgcccaggccgtgatgcaccatgctgttgacgtccaggcgctggactgcgatttttacgttttctccggccataaactttacgggccgaccggcatcggcattctgtatgttaaagaggcgttgctgcaagaaatgccgccgtgggaagggggcgggtcgatgatctcgaccgtcagcctgacgcagggaacgacatgggcgaaagcgccctggcgttttgaggcgggaacgccgaatactggcggcatcatcggtctcggcgcggcgattgattatgtgacgtcgctgggactggataagattggcgattatgagcagatgctgatgcgctatgcgctggagcaactggcgcaggtgcctgatatcacgctatatggcccggcgcagcggttgggcgtcatcgcgtttaatctgggtaaacaccacgcttacgacgtcggcagctttcttgataattacggtatcgcggtacgaacagggcatcactgcgcaatgccgctcatggcctggtatggcgtgccggcaatgtgccgggcttcgctggcgatgtataacacccatgaagaagtggaccgactggtggcaggattaacgcgtatccaccgcttattgggataacagtgaggttttatggctgcgctaccggataaagaaaaactgctgcgtaactttacgcgttgcgctaattgggaagagaaatatttatatattattgagttggggcagcgcctggcggagttaaatccgcaggatcgtaatccgcaaaatacgattcatggctgtcagagccaggtgtggatcgtgatgcggcgaaacgccaacggcattatcgaattgcagggcgacagcgacgcggcgatcgttaagggccttatggcggtggtatttattttgtaccaccaaatgacggcgcaggatattgtgcattttgatgtccggccatggttcgaaaaaatggcgcttgcgcagcacctcacaccttctcgttctcaggggctggaagcaatgattcgcgcaattcgcgctaaggccgccactcttagctaaactgtacagacagcgttctacctgatgtcaaatcctttgtcggacggcgacgtcgctttatccagagtggatagagcgtgtattttgttattctgataagcgaagcgctaccagtcgtcgcagagggcatcaccaggaatacaggaggtttggtatgaaacgtgcgtctttcattacgctaactattatcggcgcgtatagcgcgttacaggcagcctgggcggttgattatccattaccgcccgaaggcagccgtcttattggtcagaatcaaacctataccgtacaggaaggtgataaaaacctgcaggctatagcccggcgttttgatacggcggcgatgctcattcttgaagcgaacaatacgattgcgccggtgcctaagcccggtacgctaattaccattccctcgcagatgctattgccggatgcgcccagggaaggcgttatcgtcaatctcgcggagctacggctgtattattacccgccgggagaaaaccgcgtacaggtgtatcccatcggcatcggtttgcagggactggaaactcccgtcatggacacccggatagggcaaaagatccccaacccgacgtggacgccgacggcaggcatacgccaacgttcgcttgagcgggggatcacgctgccgccggtgatccctgccgggccaaataacccgctgggacgctatgcgctgcgtctggcgcacggtaatggggaatatctcattcatggcaccagcgcgccggatagcgtaggtctgcgtgtgagttccggttgcattcgcatgaacgcgccggacatcaaggcgttatttgcgcaggtcagaacggggacgccggtaaaagtgattaaccagccagtgaaattctctgtcgagccgaatggcattcgttatgtagaggtacacaggccgctatcgccggaagaagagcaaaacgtgcagacaatgccctatgtgttgcctgcggaatttaccgcgttcagaaacgcgcaaggggtggatagtcgcttggtcgataaggcgctataccggcgagccgggtatcctgtcagcgtgagcgccgggcagacgccggcggtaaatacgaccgcagtcgaatccgctcagaacggttttgtcggggaagaggggcaaacgcgcgcgacgcagtagcctttgcagcaaacgacggacaaaaaaatggcgcacgatgtgcgccattttatattgtgcgtcaaattatttacagatgcggaatactttgttgtccagacgttggttcgcgcgagcagcatcgtctttagcagcctgaacgtcggaacgcattgcatttacgtcattactcagttgctcaactttagcgctcagcgtctgtacatcggaagacaactgatcgattttagcgttgcttgaacaacctgccagtaacgtggaacccagaactactgcacctaagatcagctggttagtacggttcataacaataacattatactttgtgtggttatgtgggtaaaaaaaatggcgcacgatgtgcgccatttttattacgcaggtactattacttacggtatttagtagcctggttgtccagacgctggttagcgcgagctgcgtcgtctttagcagcctgaacgtcggaacgcattgcgttcacgtcgttgctcagctggtcaactttagcgttcagagtctgaacgtcagaagacagctgatcgattttagcgttgctggagcaaccagccagcagagtagaacccaggattaccgcgcccagtaccagtttagtacgattcattattaataccctctagattgagttaatctccatgtagcgttacaagtattacacaaacttttttatgttgagaatatttttttgatgggaatgcacttatttttgatcgttcgctcaaagaagcatcgaaatgcatgaaagtccctaaaaaaccgaaagaaaacagggggcttccatcggattcttcttagataatccgcaattagatagtaaaatccgatttgatttttttattaatagtggctatcgattaaataaaaaaagcgccggaagggcgcttttttaaacaaattaattcacacaacaattattacagtacgtgaacagaggcggtgttagtggtgccgcttggaaccagcgcgccggagaccatcactacgacgtcgcctttctgggcgaggccgctttgcagggcgacatctttgcccagacggtagaaatcatcagtagaattgatttctttcaccagctgcgataccacgcctttgctcagtactaactgacgggcggtcacttcattggtggtcaatgccaggatggtggcgtccgggaagtatttacgcacggcgcgagcggatttaccgccctgggtcgctaccacgatcagcggcgcttccagtttttcggcggtttctaccgcgccgcggcatactgcttccgtaatgcgcagtttacggctgtcgttgttgtagtccagacggctgttcatgacgcggtcggtacgttcgcagatggtcgccatgatagaaacggcttccagcgggtatttcccttttgcggattcgccggacagcataaccgcatccgtaccgtcgaggatggcgttcgcaacgtcgcctgcttctgcgcgggtcggacgcgggtttttgatcatagaatccagcatctgagtcgcggtgatcacgactttacgtgcgcggatacatttttcgatcatcattttctgcgcaaaaatcacttcttcaaccgggatttctacgcccaggtcgccacgcgcaaccatgatgccgtcggaagcttcgagaatttcatcgaagttgttcaggccttcctggttttcgatcttagagataatctggatattttcgccgccgtgagctttcagatgctcgcgaatttcgacaacgtcagaacgtttacggataaaggacgccgcaacaaagtcaacgccctgttcgcaaccgaagatcaggtcctgtttgtctttttcagccagcgccggcagagcaatagaaacgcccggcaggttaacgcctttgttctcgcccagatcgccgttgttcagcaccttacaaatgactttattgccttcgatggcggtcacttccataccgatcagaccatcgtcaaccaggacggtgttgccaacgctcaggtcgctggtaaagccttcataggtgacggcaacgatttcattattaccgaccacggatttgtcggtggtaaaagtaaaggtttggcccgctttcagcgaaacgtcgttaccgccttccagtttaatggtgcggatttctggtcctttagtatcaagcagaatagcggcttttttaccagttttgctcatcacgttgcgcaaattctggatacgctgaccgtgttctgcataatcgccatgagagaagttcagacgcatcacgttcatgcccgcgtccagcattttgcttaacatctcttcggattcggttttcggaccgatagtacaaacaattttcgtctttttcatgacagtcttagtctttaagttgaggaggatatggaaatctggcttcgggcgcgcacggcccggaagctaagcctgtgttgctaaagtgatgatgcctcgctctaaggataggtgacatcgaaagagcgtgcagaggaatgtgtgctcgcgtttcagcccaacgggaaggggataattttagtcgttgagttttacagtccaatgcgctgaaaccattcaagagacaattggcgcgcattatacgctgaaatttacaaaaaaggaaaatgaaaaccctgtttcaaaagacatctgtgcagatccacaacggtttgttattacgctgtttacgatgtcgctggcgataacgccgcccgaacaggggcggcgttgcgcaacagcgggtgttgttgcgcataatgtcaatcgagcaactttttgccttccaggtcgatggcgatgttttggttgtgtgcttttcgatagcacagaatcgctatcccgatggccgcccagctaattccgagtatcagagcgtgaatgttcatgtttaaacagacgtagccgatgacgatcatccccatgatcggcgaaatgacatgggcgaaaatgcgccgctgggctttcatccggaaattgaacaggataaacacacacaggttcacgacaaaaaaagcgaaaagcgcgccaaagttcaccagcgtggagatagattcaatcttgccggaaaacaggtagctgagcagcagggtgacgccgccggtaaacagaatggcataatccggcgttttacgcgtggtatggacgtgagcgaggaaggcgggcaacattcggtcgcgccccattgaaaataacactctggacaccgccgtttgcgcggtaataatgttgccgacggcgcacacaaacgccacaatgatggaaaacgccactttgagccagataccgccaacgttgccggcaatggtgaaaaatgcttcattcgtcgcattaccttccgcgaagcggtcgacgttaccggtggcgaacgccgcaaacgccacaacgataataaacagtaccgtcgccaaaactaacgccaacagcgttgctttactgacggcgcgtcccccgccttcgctttcttcacttaatgtactgatagcgtcaaagccgagaaagttcagcgcagccaccgaaatcgccgtcgcgatgagccctggggtgaaccactgtgaatcgaaaaaaggccggaaggaaagcgttatctgactactgtccagcagcatcagacggacaatgagtagcacgaaaatcgccagaataccgagttgaataaagaccagtaacttatcgaatttcgccgtttgctgtatcccgagatagttgactccggtgccaatagccacataaatcaacggccagacccagaccgggatttgcggtaaaatagcgtggaccgcgacgccgcccagcactgccacgagcgtagggaacaaaagataatccagcagtaatatccatccggtcagaaaccctacggcgggattaatgcatacgccagcatacgcataggccgaacccgacgaggagatatgctgcgataaggtagagtagctgtacgcggtaaaaaacatcgcgatcgcgccaataatataaaccagcgcaaccataccgtgcgaaagattataaacgacgccataaagagagactggcgcgataggcaccataaacaccagaccataaagcactaaatcggtaagagacaattttttgacttttttcatgataaataccttaatggctttttatgccagatcgcgtaaaaacgcgcttaccgctgcgaggcagggcgcgatattttcttcatgcgggttatggctgctgccgggaatagtgaccgcgcggcagtctgaaatgtgagagagaagcggagagacgacgcgctcggttgcctgatcgttttcgccgcgtagtaccagaacaggacagcgtatctggcacaaatggggcgtaatatcccagtcggcaagtttgccatttgccgccagttcattggttccccataaaatgtgataaaccgtagggtcggcggcgaactgcgcattagagcgctgaacatgaacggcttcttccgcgagggtataaacgtgtctggcataataagcgaccagctgttccggtgggttttgataaatgacggcgggcataatgacgtttttgatatcgtcatcggacattggcgtcagagcgttaaagagccgtatggcttcctgttgccacagggcgatactggccggcgaactggccagtatcgtcccgcgaagcccggcaggctgtaagcaggcgtgctctgcggcaagcattccgccccaggaatgtcccagtatcgaatacccgtgtccaatacccaggtgatgaattaattgggttaattgacggagataacgcgcaatagtccagaaagacgcgtcagcatgaggaaaatgcgttgaacgaccgcagccatattgatcgtaaaatattaccatgcgcccgtcatcagccagacggcgataatttaataaataatcaaagccgccagaagggccgccatgaaggataatgagcggcgtgagtaatgattttctgtctccataaatccgatagcttgtcaatatgttttcagaaaacatttcgccatagagataagtatcattcatattcttaatgactcagtgtgtggcagggcaggcgaaatttatattcgcctggataatattatttttttattgtgtgtaaaacattacaccagaaggtggcgtaatgttcccattgcagaaactgcggacttccccagtgcggcgaacaatcactggcaaaacaacatactttccctttatggtaagtacccataactaacagtggatcgccattaatttcagcaaggacctgactattttctttggcgataagcttgttatagcccaacagcggcggccattcgctaaatggctgggtaataacatgctctaccgcagtatttactgctttacatccttgcggtagttctacgcggtcatctacatccagcatatcaaccggcaatacttccgccagaaccgtatttttataattggcttttgcttctattcccgtaaaggataaatacccgccgatcattaacagaccgccgccctcagcaacataatcggcgataagttgtaatgcatcaggaataatgtccatattataaaacgttctgttttgtagcaggaacgtattgctaccgatatcactgatgacgatcgcatcatagcaggctaatgcttcggcggtttgtggaaaacgagtttgcacaatatgggcaggcatgtagtccacatcgatattaccctggcgtaagcaggataataaatagtctgcaccttcttcatatttgctcgatgtaaagctatcaaaacctttagagtgaatcatatgaatgtgccaggattcgccaataaataaaattttcattatgtcacctgttaattaatgtgaatgactttattagattgggtacgcattcgatgtaaaacctgcaagtgctgaggcatactcgacgcaccgacttgttccaccgccagagaagcgaaagcggaggcatattgaatggctgcgaccatgtctgcttgtcgcgccagcgcggcggctaaggcgccattaaaagcgtcaccggccccagcggcatcttttaccacggcgctccacgcaggaatatacaacgtgcgggcgtgctcacagatcagagagccacgggcgccaagggtaatgatgacttttttcaccccggattgcagaataatatttccggctttttttgcatcattaatatcagtaatggttacaccggataaaaaagaggcttcagtttcattcggcgtgatgatgtcaatatcagataataaatgcgtcacctgtttcgtatagggggcagggttcagcatgatcattttattttcttgtttgcccagacgaataaattcagtcaacgcttcaatgttcgtttcgagctgcattaacataacgtcagactcggcgatataacggtgttgctcattaatctcttgcgtggtgagcatcatattggcgccagggtagatggcgataatattatcgccatccacggcggagacatagatcaatgcgctaccggtgggtgctttatctgtttgatacgcgctgtatgaggtgatgcctgattgaataatatgattcatagcaaatgcgctgaactgatctttgcccactttaaaaataaaatgtgccgcagcgccagcgttgtttgccgctaaagcctggttggctcctttacctccaggatagaatccaaattgactggccagaatggattctccgctttgtggaaaccacggcacggttgctgaaacatcaatattgaatgagcctaaaacacacaccttgcctgctttttttgggttttcccggcgcagttttgcatcctgatggattggcgtggcgatagtgctggagatatcaatcttattttcagtgataagcttactcagcgcgtcacggtttaaaatccctccgccatagcaacgctgaagcatacctgatttctggaaatagcgtagatcggaacgaatagtctcctggctaaccttataaaggtctgaaagtttactgacgctaacactattatcctttatcagtaaattaatgatggcatgacgtctttcttctttaaacatattgcctccgggtagtgagttgaattgtatttatggcaatgttgtcatgcggtgaattcaatcacagattatgcggtcaaccggaagtaaccccaaatgaatgtcaataatcagaagcgcagccaatgtgttaaatattaattgcttacagaaggggaaaatagttttgtgagtgttgtcatatattttctatgtaatatgacggggtgaacgtaaaatagttgggcttgcacgattcagtgagtatatgcagccggacagcgttcgcttatcagtctctaccctcgacgaaataagacgatatcgctctccggcccgggggttatatacgctcgatttttgccggcagcccctgacgtactgccgcgccagaaacccagtcgagccaggtgttggtaatggttcttgtcggatcggcaaagcccagatcgttaagatttatgcctgccctgatttgtggatcatacggcataggcacgccatccagagagtgctgcgttgcgcccatctcgcggtggccatatccgtgttcgatggcgatgacgcctggcatcacgccatttaacaaactgatttgcgccacgacctgaccgcccggcgtaatgatccgtacccgatcgccatgttgcagtccataacgctcgccgtcttgcggattcagcgccaccaggtttgctggcttcacatggtgtaagcgcgggatgacggctgttgagctggacatggtatttgatttaaatgaaatcagtttcagcggccattgcccaatgggaaactggtcgtcaatcgcacgaccatctgacaaacgcgccggataccagaccgggcaaccgctgaagcgctccccggtgatggcgtgacggtgggcggcgacatctgcattccagatctgtaagggttttttccacgcgttacctaaccgttgctccgtatagccgctatcctcgggcgcaaaccggccgccacgcgagtagataaacgccacgcgaccgacctcatcagctttaagcgtgtgctgaattgctggcagaatgcggctgacgccggtaagcgaaatatcttcctgatttgccagcgcgaccggcgtcttgcccataaaggcgatattagcggctacgcgcagatagaagtcttccgcccggttcagtggaaaagtattgccctgcggatcggttatcgcccggtcgccgaagccgggcagatggagccgttttgctaccgcaatacaaaatgcttccattgagacaggttgcccgtccgccgtgcggtgagtggcgggggcgacaaccggccagcgggcggtagtggctttactggctacgccgccccagggcgccgtaaagccccagctctcaaaattgtgcgtatccggcacaatgtaatccgccagcgccgtcgtttcattcataaaggcgtcaatcgcgataaagagcggcagtcggcgagggtcttttagtttttcttccgccacggcgcgtagaccgggaacaccgtaaaacgggttgctcatattggaaatccaggctttaagcggataaggatagccttcgagcgcggaggtcaacagttcggtaagctggcctgccacaaagggataccacggcgctttggctggataaggggattgcccaccggcaattttgtcgcggtattcttccgatgcttcataagcggttttgctacgggcaatacttaacccggacggtttcacttttccggcaaaactgttcatgttgtagcgggggccgtcgctaacgccgttgaatttgccgccgccgacaaagacgccgccggacaagctgaggttgccgatcagcgcgttaagcatcatgaccgaccaggcgttataaaacccattgccggccatcatgccgccgtgactgatgaccgcagctttacgtccgtgactggtaaaggtttccgccagcgcgataatttgcgcttccggcacgccgcactgttcgctgtattgcgccaacgagagcttttctgccgcctctttcaggcgttgcaacccgctcttcaccgtgacccgttggccgtcggcgagcgtaacgtactgcgtcacgaaaagccgtgcctgtcggcaagtggacgcatcgaccaactcgccgtcggtattcagtacgacaggggtctcttcgccatcgggcgtaagatggcgcagcgtcaggtgttgtccggcaagcgtcggcagctcatccgcaatgaccaggtgcgtggcgttggtccaactttgctcgccggcctgctgcatcgcctgtacgccgggaatcgccagataatcagcattataacgttgattatccatgatccagcggatcatccccattgccagcgccgaatcactgccgggcatgaccggttgccagcgaccgcgaggatcggcgagcaccgttgataaggggagggcgggggcgaccacgacgtattgaaaattctcacgcagtcgggcgctcgccaactgacgtgcctggcgtttaaacggattgccggactgtgccggggaggtgcccataaagagcgcaaactccacgttttcccagtcgggtttgacatgcgggtttttatccagatcgcccatcaatgccccggagccggcccggtaagccagtccacagtaggcgccatgcgcgccgaaattcttgctgccgaagctatttagcgcaaaacgacgcagaaacgcatcgcggccttcgtcgctggtattcgtgaccagtaactgattggttttgggcccgaaactggggtgctttgcgtcaattggcgtatccggcgcatgaatagcgcgcagtccgtccacatgaccttcgccaaacagatcgccgccttccacgacttcttcaataagttgctcaaagctgatgcgctgccatttcccttcgccgcgtttacccacgcgtttcatcggttcaagcagtcgtagcggactgtacaggctttccagcagcgtggcgccgcgcgcgcaggcggttgagcgggcgtcaagaccgctttctcccgccagttgctccatggcttcgctaaaagggacggacgagtcaatcgggtgttcctgcgacaaggggtgatagggattgccggcgatgcgtatcactttgccatcggcattaacccgggcgcggataccgcactgtgtccaacagccgaagcattgcgtcatggcgatggtttgttgtggattttgctgccagtgtgtttgcgcctgcgcctccggaattaacgcattgccaaagatgcggtcgcgcgttaccttgccggacgtcccgtttaacaggccatcaattgcgcgtttcgccacatcacggtagctcagaccaaaagtgaccatcccaccgacggcgagaccgacttttagccactgacgacgggttaaattagccatgttgtaatctcctggtgagtccgttcagcgtttcacgaataataatcagtagcgctatccacaggccgaaggtgccgagaatagccagccagccatccgttccgcctggtaacgagtaagggttaaattgcgcgttgaacttggggacggtttgtacctgaatcaacaatgtccagcgcatcagccaacatagcgccagcgcgctgagaaccagcaggacgcgtcttagctgtgataacggatggcgtagcgccaggctacagaacagcagtgtgcatacccacagcgctacccagccgacagcgtaatatttggctgacagggcgacggtaatccactgacggattgccgtgccggaaagcgtatcgccgctaacccacatggccacaaccagccccagcgccgccagcgtccagatttgtccccacaatatttttggcagccttaccgagtcgtgtcgggcggcgacaatcatcagcgcgaagaatgcctgtaaggcgctaagaaacatcgccacggggaaggcgtagctaaaccagattgggcgcgccagcacaacggagacttcgcggccggtataaatcaacaggcccaccgcgcaaagcgcgctggctaacgccaaccatttagtgacgttgtaacttttattgaataatcgtttaatctgctgcgccaggaaccacagagcgagaaatccggtaaacagcggcaggaataacgctccccagggcatccacgaccagggcgtcggccaggcatagaaatgccagacgcgggcggtctggtgcagatccgccgtcagcgccagcggtgcggtaatcgcacaggtaatggcaatcagtaatgcccgattttcttctgttgcggcgtcttttttccgccagtgaagataacaggcaaacagtgcggcgcaggcggcaatgccaataaaaaagaaatattgtaccgcccacggcagccagctaatgtcctgcgggtgagccagcacttcttcaatgatgagtgaatgcgtcattcagacctcctgccaaagcgcgggctgcgcacggcccattaatggggtgacaaaggcgtcgtccagacccaggtagaaaacatggggcgacgtgccgttttccggctttaataccttgatagcgtcgcgatgctgatgaagcatggtggcgatgcggctatggggatctttgatatcgccaataatacgcgcgccgccgacgcaggactctacgcaagcgggtaacagtccggcttccagacgatggacgcaaaacgtgcatttatcggcagtttgcgtttcatgattgataaatcgggcgtcgtaaggacacgcctggacacaataggcgcagccgacgcagcgtttgttatccaccaccacaatgccatcttcccgctgaaaggtggcttgtaccgggcagaccggcacacagggggggttatcgcaatggttgcacagacgcggcaacagcacattcgtgacttcctgactaccttcacgctggacctggtattggttcaccgtcgtacgaaacgcgccttgcggcgtttggttttcaatagtgcaacttacggtacaggactgacagccgatacaacgccgcagatcgataagcatggcgtaacggtgtcggggagagccttcatgccgctccggcgaaaaaggaaatttcgcttcagccagcggaaccagcgaggcgccagcggtcaggacgccaagctgctggagaaattgccgtttactgctgtccatattgactcccgtccacattgccaacaatgaaacatttgtcacgatgttggttcatgtgtaatgaataaaaaatgtcgatgatttacagtgtaaaaatcgaggcggggtgcgctctattgtggttaaccacatacccggcttgttgttgatctaaaacaacataattgacagggatattggggtgagaggtaaaaccgtaaggcgcctggcggtgttggcggcagtagggctactttgtcatggcgcgtgggcagggacgtggaatatcggtattttggccatgcgcggcgaggcgtctacgcgtagccactggcaaccgttggcaaagacattaagccaacagcttccaggcgaaacctttcacatccagccgctggatctgcatcaaatgcaggaggccgttaaccagggaaccgtgcagtttgtgataaccaacccggcgcaatttgtccaactgaacagccatgcgccgctgcgctggttagcttccctgcgctccacgcgcgatgggaaagcggtgagtaatgttattggcagcgtgattttgacccggcgcgatagcggcatcaccacggcgcatgatctcatcggtaagaccgtcggcgcgattgatgctcaggcgtttggcggctatttattaggctataaagcgctcagcgacgcgggcttacgcccggagcgcgattttcatctccgttttaccggatttcctggcgatgccttagtctatatgctgcgcgaaaaagcggtgcaggcggcaattgtgccagtgtgcctgttagaaaatatggatcaggaaggattgattaataaaaaggactttatcgcgctgctttcccgaccgacgcccctgccttgcttaaccagtacgccgttatatcctgactggtcgttcgcggcgctacctgcggtaagcgatgcgctggcggatcgcgtaacgcgagcgctattcaacgcgcccgccgccgcgtcatttcactggggcgcgcctgcgtccaccagtcaggtggaagccttgctgcgtgatgttcgtcagcaccctcagcagcgtcgactgtggctggatgtcaaaagttggttaatccagcaccagctaatggtcggcggcgtgattctggcgttcttgttgctcacgctcaattatatttgggtcatgctgctggtgcgtcgacgtggaaagcaactggaacgtaatagcgtagttcttcatcagcatgagcgggcgctggaaaccgcccggcaaatgagcgtgttgggtgaaatgacctccgggtttgcccatgagcttaatcagccgctttccgcgattcgacattatgcccaggggtgcctgattcgactgcgcgctgcagatgaacagcatcccttgctgccggcgctggagcagattgaccagcaggcgcaacgcggtgcggatactctgcgtaacctgcgtcactgggtcagccaggcgcagggcaacccggtgctaaccgaagcgtggaaggccatagccattcgcgaggcgattgatcatgtctggcaattgttgcgtatggcgcaacagtttccgacagtgactctgcataccgaggttagcgctgcgctgcgcgtaacgctgccgtcagtgctgctggaacaggtgctggcgaatatcattcttaatgcggctcaggcgggcgccacccatttatggatcgttgctgaacgcactgaaaacggcatcagtattgttttacaggataacgccgggggaatcgatgaggcgctattacgtcaggcgtttcagccgtttatgaccacccgtaaagaggggatgggcttagggctggcgatttgccagcggctggtgcggtatgggcggggcgatatcagcatcaggaaccagaccgcgccggacggtctgtcgggaacggtggttacgatacatttcttacatgaaaatgggggcagggatggcgacaattcatctactggatgatgatacggcggtcactaacgcgtgcgcgtttttactggaaagtctgggatatgacgtaaaatgctggacgcagggggcggattttttggcgcaggccagtctgtatcaggccggggtcgtattactggatatgcgaatgccggtactggatgggcagggcgttcatgatgcgttgcgccagtgcggaagtaccctggcggttgtttttcttaccgggcatggcgatgtaccgatggccgtggagcagatgaaacgcggcgccgtcgattttctgcaaaaaccggtatcggtaaaaccgctacaggcggcgctggagcgtgcgctgacggtttcatcggcagcggtggcgcgtcgtgagattatactgtgttaccagcagttgacgccgaaagagcgtgagctggccagcctggtggcaaaaggatttatgaaccgtgaaattgcggaagcgatgaatatcgcggtgcgtaccgtagaggtgcaccgcgccagagtcatggaaaaaatgcaggccggtagcctggcggaactgattaggcgtttcgaaaaaatggcctcgccagagaccagaatacgaacaacgtatgagccatgaataataaaccgcgttatttctttgatttgcatcaaattttgtttaatagagaagactgttatattctgttggtttgatctggcgacgagtaaaacgtatgacaaaaccgacaaaagatgacgaactgtaccgcgagatgtgccgggtggtgggcaaggtcgtgctggaaatgcgcgatctggggcaggagcctaaatatattgttattgcgggcgtgttaagaaccgcgctggcgaatcaacgcatccaacgtagcgcgttagaaaaacaggctatggaaaccgtgattaacgctctggcgcggtcatagccgctatcagggtggcaataacgacatcgcctttgaattgtcgcgattgtcaccatggcgggcgggttacccgccgttagcgatgcgcagggttatcaggtgatggctaagcgcagccctaatgtatcagggtacggctcaaaataattctggctgcgtagatagtcatccggatgttccgccagatagtgcttcagcagcgttaacggtgccaggataggtagtcggcccgcccggtagccgagaatcacctcgcgtaattccgcgcgttgcctgctgttcaacgcgcggtgaaaatagccctggatatgcatcagcacattggtgtgatttttacgtgaagcggggtggcgcaggatagccatcagtttttctctgtatcggacaaagaaggcatccagatcgtcccactcatgcagacgcgcgacgaaagggccaatttcgcggtagccggcctggtggtgggcgagaagctgaagtttgtatcggctatgaaacgcgagcaaactgtgacgactcaagccctgcgcgcgtagcgcatttaattcatgtagcgcgaagatacgtgcgatgaaattctcgcgtagtaccggatcgtgcaggcgaccatcttcctctatcggcagccagggatatttgtccatcatcgcggcggtaaacagccccgtgccagctttgcggcccctgttacccttttcatcatacaggcgaacgcgctccattccgcaactgggcgattttgcacacacaataaaccccgccagttcgcctattgttggcagaaaccgatcagcaaaggcattcattcgctcggtgacgtcatcgtgcggggcatggctatagcgcatccgaatgtcgccacaggtcgtctggataagacgcagcgcagggcggggcacgggcaggccgatcgccacctccgggcagatcggtttgtaggccacccacggcgccagagagttcatgacaaaatccatacgcttatgtccgccatcaaagcgtaccgtggcgccagtcagacatccgctaatgccgactacgggtttgttattcatgattcccccttattgaaagtacgacgactgacgccaatggcgcaaaatgttatctcacgctgatttaaaacttacacaactttgtttttttgtctaagttttcgcggagattttttttgacgtaattaaatatcaataagatagaatgaggggaagaaatctatttcagcgcctatagtgtgataacctccagcgaagcgaccacgttgcgccactgggcaagctgttttttctgcccggcagtgagctttccggtggtcaccaggaaccattttctctgggcgaacagctcgggcgccagcacaactgggggcgagggaagcacattgagccgcagctcttgtccggtacgagtcaacgcttccagccagatttcacagtgatccgagagattccatccgctaataaaggcattgttgccaggcgcttttctgtcgccttcaaggcaaaaagaggtgtaggcaataatgatgccatccagtatttcgcgcagcgtcatcacggcgggaagatgcgcggacactttgctgcgcaacggacgcaataaatgggtcaccagttctgcgcggggatattcccggccacagtcataaatcaactgccgcagcgcgtcaattcgcccttcgtggagatgttgaagcatcgtctcctggatcgttatccagttatcgcccaggcgaataaccggacgcgacagtaaggggttgacctggcttatcggtacgccttttctcacccagtcgagaatgctaagcgcttgtcgaatatcgtcatcgctgtataagcgatgtccgccatcagtacgctgcggtttcaataaaccatagcgtcgctgccatgcccttagcgtggcggcattgataccgcatagtctggcaaattcgccgatagaatacgacatggtaaagcccgttaaataaggggattctactatatcatgatcaaatgaagactaaggtagtgataaatggtgcggcataccagggcatccgtatggattttgtcgatgatgagcaatactgcgtggcgtaaggctcatcaaaatatgaccaatgcttaataccatcggacgcccctggttaatactctattaacctcattcttcgggcacagttaagtaactctgtcactttatgaacctgtagctttctcatcatattcatccggtgtgtttcgacggtttttatactgatatgtagcttttcgctgatcccatgattggtatacccctcgtcaataagtttaagaacctgacgctcgcgcaaagtaagcagttgatgattggtcgtgtcagcgtttaattcagccaggatagcttcccgattcaacgttgggtcaatgtaacgcttgtttactgctactgtttgcaatgccgctaacagaacttgctgactactgctttttaaaacatagccattagcacctgcggctaaagttttaatggtcatatactcttgttggtatgctgtgtaaaccagaatattcattgctggccaacgctgatgtaattgaggaatgatatccaggccattgatgccaggtagactaagatcaaggataagtatgtcaggctcgtatgcacaacaggcattataaacctcaagaccatttttaacatgctctacaattttaaaatgaggccagggtaataaggcattcataatgccgttaatgatgatttcatgatcgtctactaataagatcttatattctttcattttgctgccctcgcgaaaattaagataatattaagtaatggtgtagtttttgaagatcatacgtattttctggcgtaagtcggttagttcctccagcgcgatgattttccccatttttacgcgattctcaatgtctatgacatagcataccaattcagtctgccctatttgacctaaacagccttttaatgtgtgaattaactgatcgattttttctccagccgatacggcattttcaatatcagccagcaagaggtccagtgattggaaaatcttgctattaatgaccatatcatctgtcgccagtagcgctgagcagcgactcggatcctgctcctgtagctctatatttcgtaaaagttggtattctgcggcaatactgatgtagcgagctaaggtagccaatgtcactggttttgtaatgtaatgatgaatcccattttttttacaacgatgaatatcttctgtcgctacgctagcggatagtgccacaaacatgcagtcaggatctaaattattcggctcatcatgccataatcgtacacattcaataccatctatttctggcattctaatgtcaatcagtactaaatcgaatcgctgctgttgtgataaagtcagagcctcgttactactggcggcaatagtgacgtgttggcccaggctgacaagcattttgccgatgatatcccgattaatatcggcatcatcaaccaaaagaatctgcaactgccagggtggtaacaaattatttattactggcatatttggtgtacacaatattaactgttgcgccaggtcgtagagttttccggagaaatacaaaagctctgcgttgagaagcgcattttgctggtggggtggttcaccgcgtattccccagcaagccagttgccgatgcaggcagaacggcgctgacagcgtccctttaattggttgaggcggctggtattcttgtaagggtaatactagcgagacacaggttccaaccccggggacactttttagtgtcagattaccgcccatcattttagccaggcttgacgcaatagtcagtccaattcctgtaccttgcgaatttgtgtctgcttgataaaaagcagtaaagatttgagactgctgctgtatttcaatccctttaccgctatcgctaaccagaaatattaattgttcctcatgacgcttgaccgtcagacgtatccctccggtttcggtaaattttaccgcgttcccgagtaaattaaccaaaatttgccgtaaacggatactgtcggtatgaaaatagagagggacatgttgaccgacaaaagtacgtaatgacagttttttgctttgcgctggcccctggatggtttgcattgcctggtccagtaacggcagtaacgctgtttcttccatatgtaatgtgaaatgaccagactcgatgcgtgaaaaatccagcagattattaataatagctaacaaagacagtgtacaatttctggcggtatcagctaatccttgttgctctatgtttaaaggggtggtttgtaataattcaattgcaccgagtacgccattcatcggagtacgtaactcatgacttattaccgtaagatgaatgcttttacgtttgttagctcgctcagcgcgtttttttgcttcatttagcgcctgggtgcgctctgcgactttgttttccagattgtcgtattggacttgtagagtatcaagcagttggttaaaagcaccggcaatactatctaattcatccagtcgttgtgctggtaaacgtgtgctcagcggtgcagttgcggttttattaatgacatcgacaaaacgccataacggtttggccagtgagcgatgtagtaaccagcaaaaagccgacgtcatcaacaccaatgctgttaatgtaaaggggatttgttgaaggataatttttaagatgcgattatgtagattaccgtatgggtacagcgtaaccagactccatccggggccatgcaaggttgtgcgtaatatcagaaatccgggaatttgctgccatccatcatgcagcgttacattttctaactgtgtacgtattttttgcgggatgtatgaaaacggcaataagtggttgttttgatccagccatactcgaatactatcatctaatggcaggtggctcttagtaatgagatcgggaagtttaaccgtcacctcaaaaaatacgccttgctgatcggcaaccgcaacggaagcgtgccatcctttgccgtttatgtattctggttcactccagtaaaacccggcatgggttgggtataaaggaaagctttttcgcgttaaaggctgtagagttgaataatctgaagggttatcagtagataataacgaaatctcatttttatgattaagaataaaactatcgcgacgaaagctattttcatcgatatcagaggactgcagaaagagacggtgcttctctccgtttagcgtcggcgtgcaatttgaaggaccgacagatagatgccggctcacctcagggaaaatatcgttatgatgaatctcagtcgctaatgagcattgatacattaaatttttagcgtcacgttcagcttcttcaaaccgttgattgcttagtacaatattcatctcggatagaacggataaatcctctattatatgctgccgtttctgaaccattgatatataagctgcggtaagcacagatagcagccaaataattattgttgttaataaaaataaaaaagttagcctgattactaaagatgtttgcagcgtattcttgagattgagcaaattcataatgcttccctccagttgcctgttgcaaaatctttggcacttgatcactatcgcagtacatatagtttcatcagaagattaatcgatggtgttatcattaggaagataaatttcttcatatataacccagtcgatgactacaattactttttaataagatggcgatgtaaaaacatcgtaacagtttatttaataaataatttttcaaattgtaagtttttatgtcaatgctgaaaatgtaattgtgaatttatcggaaaatccgaatgatagaatcgcctgtgacaaggtatatgtagacagcatcctgatattgtacaagaagagtatagtcgaaataaatgtgaatcaggctttttacggatgtggttgtgagcgaatttgatagaaactcccatttatgtctgaggagggattcatgctggcagttttaaaaggcattccattaattcaggatatcagggccgaaggtaatagccgatcctggataatgactattgatgggcatcctgccagaggagaaattttctcagaagcattttctatttctttgttcttaaatgacctggaaagcttacctaagccttgtcttgcctatgtgacactactgcttgcagcacacccggacgtccatgattatgctatacagctcacagcggatgggggatggttaaacggttattataccacaagtagtagctctgagcttattgctattgagatagaaaaacacctggctttaacttgcattttaaaaaatgtaatacgcaatcaccataaactttattcgggtggggtataaaatggtagtaaataaacgtttaatcttaattttactatttatactcaatacagcaaagagtgatgagttatcatggaaaggtaatgacttcaccctttatgccagacaaatgccattagcagaggttttacatctgctctcagagaactatgatacggctattactattagcccattgataacagctacatttagtggaaaaattccgcctggaccaccggtcgatattttgaataacctggcagcacaatatgatttgcttacctggtttgatggcagcatgttatatgtatatcctgcatcgttattaaaacatcaggttatcactttcaatattttatctactggacggttcattcattacttacgcagccagaatatcctttcatcaccgggatgcgaggttaaagaaattaccggtaccaaagctgtggaggtgagcggtgttcccagctgcctgactcgtattagtcaattagcttcagtgctggataatgcgttaatcaaacgaaaagacagtgcggtgagtgtaagtatatacacgcttaagtatgccactgcgatggatacccagtaccaatatcgcgatcagtccgtcgtggttccaggggtcgttagtgtattgcgtgagatgagtaaaaccagcgtcccgacgtcatcgacgaacaatggttcacccgctacacaggcattgcccatgtttgctgccgacccacgccagaatgcagtgatcgttcgtgattatgcggccaatatggccgggtatcggaaactcatcacagaattagatcaacgccagcagatgatagagatttcggtgaaaattatcgatgttaatgctggagatattaaccagttaggcatcgactggggaacggcagtgtcgctgggtggcaagaaaattgcgttcaatacaggtttgaatgacggtggtgctagtggtttttcaacggtaatcagcgatacctcaaactttatggtgcgtctgaatgccctggaaaaaagctctcaggcttatgtactttcccagccatctgtggtgactttaaataatatccaggctgtgctggataaaaatattactttctataccaaactgcagggagaaaaagtggctaaacttgaatccatcactacgggttctttgttacgcgttacacctcgcttgttaaatgacaatggcacgcaaaaaataatgcttaatcttaatattcaggatggacaacaaagtgatacgcaaagcgaaacagacccgctgcccgaagtgcaaaattctgaaattgcttcgcaagccacattattggccgggcaaagtctattgctgggagggtttaaacaaggtaaacaaatccactcgcaaaacaaaatccctttattgggcgatattcctgttgtaggtcatttgtttcgcaatgatacgactcaagtacatagtgtaatcaggctttttttgattaaagcctcagtagtaaataatggcatatctcatggttaatccaaagagttcctggaaaatacgttttttaggtcacgttttacaaggccgggaagtatggctgaatgaaggtaacctgtcactgggggagaagggatgcgatatttgtattccgctggctataaatgaaaaaattattctgagagaacaggcagatagtttatttgttgatgccgggaaagccagagttagagttaatggccgcagatttaatccaaataagccgctaccatccagtggggttttgcaggttgcgggagtggctatcgcgtttggtaaacaggattgtgaacttgctgattatcaaatacccgtttccagatcagggtactggtggttggctggcgtattcttgattttcatcggtggaatgggtgtcctgttaagtattagtggtcagcctgaaacggtaaatgacttacctttgcgggttaagtttttattagacaaaagcaatattcattatgtgcgggcgcaatggaaagaagatggcagcctgcagttgtccggttattgctcgtcaagcgaacagatgcaaaaggtgagagcgactctcgaatcatggggggtcatgtatcgggatggtgtaatctgtgatgacttattggtacgagaagtgcaggatgttttgataaaaatgggttacccgcatgctgaagtatccagcgaagggccggggagcgtgttaattcatgatgatatacaaatggatcagcaatggcgcaaggttcaaccattacttgcagatattcccgggttattgcactggcagattagtcactctcatcagtctcagggggatgatattatttctgcgataatagagaacggtttagtggggcttgtcaatgttacgccaatgcggcgctcttttgttatcagtggtgtactggatgaatctcatcaacgcattttgcaagaaacgttagcagcattaaagaaaaaggatcccgctctttctttaatttatcaggatattgcgccttcccatgatgaaagcaagtatctgcctgcgccagtggctggctttgtacagagtcgccatggtaattacttattactgacgaataaagagcgtttacgtgtaggggcattgttacccaatgggggagaaattgtccatctgagtgccgatgtggtaacgattaaacattatgatactttgattaactatccattagattttaagtgagtggaaaatgacaactttgacccggttagaagatttgctgcttcattcgcgtgaagaggccaaaggcataattttacaattaagggctgcccggaaacagttagaagagaacaacggcaagttacaggatccgcagcaatatcagcaaaacaccttattgcttgaagcgatcgagcaggccgaaaatatcatcaacattatttattatcgttaccataacagcgcacttgtagtgagtgagcaagagtaaagtaaaaatatcttagagcctatcccaccaggcgttaattggcgcagccagtttggacacggatagcgcgcaaaaaccgcagcgtacacgtagtacgtgaggtttgactcgctacgctcgcccttcgggccgccgctagcggcgttcaaaacgctaacgcgttttggcgagcactgcccaggttcaaaatggcaagtaaaatagccctaatgggataggctcttagttagcacgttaattatctatcgtgtatatggaggggaatgatgataaagaaaaaggctgcgtttagtgaatatcgtgatttagagcaaagttacatgcagctaaatcactgtcttaaaaaatttcaccaaatccgggctaaggtgagtcaacagcttgctgaaagggcagagagccccaaaaatagcagagagacagagagtattcttcataacctatttccacaaggcgttgccggggttaaccaggaggccgagaaggatttaaagaaaatagtaagtttgtttaaacaacttgaagtacgactgaaacaacttaatgctcaagccccggtggagataccgtcaggaaaaacaaaaaggtaaagcataatgtcttcaggaaacatcttatggggaagtcaaaaccctattgtgtttaaaaatagcttcggcgtcagcaacgctgataccgggagccaggatgacttatcccagcaaaatccgtttgccgaagggtatggtgttttgcttattctccttatggttattcaggctatcgcaaataataaatttattgaagtccagaagaacgctgaacgtgccagaaatacccaggaaaagtcaaatgagatggatgaggtgattgctaaagcagccaaaggggatgctaaaaccaaagaggaggtgcctgaggatgtaattaaatacatgcgtgataatggtattctcatcgatggtatgaccattgatgattatatggctaaatatggcgatcatgggaagctggataaaggtggcctacaggcgatcaaagcggctttggataatgacgccaaccggaataccgatcttatgagtcaggggcagataacaattcaaaaaatgtctcaggagcttaacgctgtccttacccaactgacagggcttatcagtaagtggggggaaatttccagtatgatagcgcagaaaacgtactcatgaaaaaagacccgaccctacaacaggcacatgacacgatgcggtttttccggcgtggcggctcgctgcgtatgttgttggatgacgatgttacacagccgcttaatactctgtatcgctatgccacgcagcttatggaggtaaaagaattcgccggcgcagcgcgactttttcaattgctgacgatatatgatgcctggtcatttgactactggtttcggttaggggaatgctgccaggctcaaaaacattggggggaagcgatatacgcttatggacgcgcggcacaaattaagattgatgcgccgcaggcgccatgggccgcagcggaatgctatctcgcgtgtgataacgtctgttatgcaatcaaagcgttaaaggccgtggtgcgtatttgcggcgaggtcagtgaacatcaaattctccgacagcgtgcagaaaagatgttacagcaactttctgacaggagctaaaaatgaatcgaattcacagtaatagcgacagcgccgcaggagtaaccgccttaacacatcatcacttaagcaatgtcagttgcgtttcctcgggttcgctgggaaagcgccagcatcgtgtgaattctacttttggcgatggcaacgccgcgtgtctgctatccgggaaaattagtcttcaggaggcaagcaatgcgttgaagcaactgcttgatgccgtacccggaaatcataagcgtccatcattgcctgactttttgcagaccaatcccgcggttttatcaatgatgatgacgtcattaatactcaacgtctttggtaataacgctcaatcgttatgccaacagcttgagcgggcaactgaggtgcaaaatgcattacgtaataagcaggtaaaggagtatcaggagcagatccagaaagcgatagagcaggaggataaagcgcgtaaagcgggtatttttggcgctatttttgactggattaccggcatatttgaaaccgtgattggcgccttaaaagttgtggaaggttttctgtccggaaatcccgcagaaatggctagcggcgtagcttatatggccgcaggttgtgcaggaatggttaaagccggagccgaaacggcaatgatgtgcggtgctgaccacgatacctgtcaggcaattattgacgtgacaagtaagattcaatttggttgtgaagccgtcgcgctggcactggatgttttccagattggccgtgcttttatggcgacgagaggtttatctggcgcagctgcaaaagtgcttgactccggttttggcgaggaagtggttgagcgtatggtaggtgcaggggaagcagaaatagaggagttggctgaaaagtttggcgaagaagtgagcgaaagtttttccaaacaatttgagccgcttgaacgtgaaatggctatggcgaatgagatggcagaggaggctgccgagttttctcgtaacgtagaaaataatatgacgcgaagcgcgggaaaaagctttacgaaagagggggtgaaagccatggcaaaagaagcggcaaaagaagccctggaaaaatgtgtgcaagaaggtggaaagttcctgttaaaaaaattccgtaataaagttctcttcaatatgttcaaaaaaatcctgtatgccttactgagggattgttcatttaaaggcttacaggctatcagatgtgcaaccgagggcgccagtcagatgaatactggcatggttaacacagaaaaagcgaagatcgaaaagaaaatagagcaattaataactcagcaacggtttctggatttcataatgcaacaaacagaaaaccagaaaaagatagaacaaaaacgcttagaggagctttataaggggagcggtgccgcgcttagagatgtattagataccattgatcactatagtagcgttcaggcgagaatagctggctatcgcgcttaatctgaggataaaaatatggaagcgagtaacgtagcactggtattaccagcgccttccttgttaacaccttcttccactccatctccctccggggagggaatgggtactgaatcaatgcttctgttatttgatgatatctggatgaagctaatggagcttgccaaaaagctgcgcgatatcatgcgcagctataacgtagaaaaacaacggctggcctgggaactgcaagtcaatgttttacagacgcaaatgaaaacaattgatgaagcgtttagagcatcaatgattactgcgggtggcgcaatgttgtcgggtgtactgacgataggattaggggccgtaggcggggaaaccggtcttatagcgggtcaagccgtaggccacacagctgggggcgtcatgggcctgggggctggtgtagcgcaacgtcaaagtgatcaagataaagcgattgccgacctgcaacaaaatggggcccaatcttataataaatccctgacggaaattatggagaaagcaactgaaattatgcagcaaatcatcggcgtggggtcgtcactggtcacggttcttgctgaaatactccgggcattaacgaggtaaacatggtgcaagaaatagagcaatggttacgtcggcatcaggtgtttactgagcctgcatatttaggggagaccgccatattacttgggcagcagtttatattatcgccttacctggtgatctatcgtattgaggcaaaagaaatgattatttgtgagttcaggcgcctgacgcccgggcaacctcgaccacagcaattgtttcacttactgggacttttacgcgggatatttgtgcatcacccgcagttaacatgtttaaagatgttgataatcaccgacgttctggatgaaaaaaaagccatgctacgcaggaaattattgcgcatcctgacagtaatgggagcgacctttacacagcttgatggcgataactggacagttttatccgccgagcatcttatccagcgacgtttttaaatgaccttcctgacgtaaatcattatcacgtgaaaataacaatcaataggtatgatgatgaaagaagatcagaaaaataaaatacccgaagacattctgaaacagctattatccgttgatccggaaaccgtttatgccagtggttacgcctcatggcaggagggggattattcgcgcgccgtaatcgattttagttggctggtgatggcccagccatggagttggcgtgcccatattgcattggctggcacctggatgatgcttaaagaatacacgacggccattaatttctatggacatgccttgatgctggatgccagccatccagaaccggtttaccaaacgggcgtctgtctcaaaatgatgggggaacccgggttggcgagagaggcttttcaaaccgcaatcaagatgagttatgcggatgcctcatggagtgagattcgccagaatgcgcaaataatggttgatactcttattgcttaaataacagaacgaaatatgaaaattcatattccgtcagcggcaagtaatatagtcgatggtaatagtcctccttccgatatacaagcgaaggaggtatcgtttcctccccctgaaattccagcgcctggcacccccgcagcccctgtgctgcttacgcctgaacaaataaggcagcagagggattatgcgatacattttatgcaatacactattcgtgcgctgggtgcgacagtcgtgtttgggttatcggttgctgcagcggtaatttctggcggggcaggattacccattgctattcttgcgggggcggcgctcgtgattgctattggggatgcttgctgtgcgtatcataattatcaatcgatatgtcagcaaaaggagccattacaaaccgccagtgatagcgttgctcttgtggtcagtgcgctggccttaaaatgtggggcaagtcttaactgcgctaacacccttgctaattgtctttctttattaatacgttcaggaatcgctatttctatgttggttttacccctacagtttccactgcccgcggctgaaaatattgcggcctctttggacatggggagtgtaattacctccgttagcctgacggcgataggtgcggtactggattattgccttgcccgcccctctggcgacgatcaggaaaattctgttgatgaacttcatgccgatcccagtgtgttattggcggaacaaatggcagcgctctgtcaatctgctactacacctgcattaatggacagttctgatcatacatctcggggagaaccatgaaacctgttagcccaaatgctcaggtaggagggcaacgtcctgttaacgcgcctgaggaatcacctccatgtccttcattgccacatccggaaaccaatatggagagtggtagaataggacctcaacaaggaaaagagcgggtattggccggacttgcgaaacgagtgatagagtgttttccaaaagaaatttttagttggcaaacggttattttgggcggacagattttatgctgttccgctggaatagcattaacagtgctaagtggtggaggcgcgccgctcgtagccctggcagggattggccttgctattgccatcgcggatgtcgcctgtcttatctaccatcataaacatcatttgcctatggctcacgacagtataggcaatgccgttttttatattgctaattgtttcgccaatcaacgcaaaagtatggcgattgctaaagccgtctccctgggcggtagattagccttaaccgcgacggtaatgactcattcatactggagtggtagtttgggactacagcctcatttattagagcgtcttaatgatattacctatggactaatgagttttactcgcttcggtatggatgggatggcaatgaccggtatgcaggtcagcagcccattatatcgtttgctggctcaggtaacgccagaacaacgtgcgccggagtaatcgttttcaggtatataccggatgttcattgctttctaaattttgctatgttgccagtatccttacgatgtatttattttaaggaaaagcattatggatattgcacaattagtggatatgctctcccacatggcgcaccaggcaggccaggccattaatgacaaaatgaatggtaatgatttgctcaacccagaatcgatgattaaagcgcaatttgccttacagcagtattctacatttattaattacgaaagttcactgatcaaaatgatcaaggatatgcttagtggaatcattgctaaaatctgaagttattagcgacgatgttcgacggttgctgctggaaatcatgtttgcgggcgttaaccatagcctgatttcccaggtacatgcgatgttaccagcgctaacggttattgttccggataaaaaattacagttggtatgtctggcattattgttggcgggtttaaatgagccgctaaaagccgcgaaaattttatcggatatagatttgccagaggctatggcgctgcgtctgttatttcctgcaccaaatgaggggtttgaaaattgaatatttctgatatgagcgtagtgcctgtaagcactcaatcttatgtaaagtcctctgcagaaccgagccaggagcaaattaatttttttgaacaattgctgaaagatgaagcatccaccagtaacgccagtgctttattaccgcaggttatgttgaccagacaaatggattatatgcagttaacggtaggcgtcgattatcttgccagaatatcaggcgcagcatcgcaagcgcttaataagctggataacatggcatgaaggttcatcgtatagtatttcttactgtccttacgttctttcttacggcatgtgatgtggatctttatcgctcattgccagaagatgaagcgaatcaaatgctggcattacttatgcagcatcatattgatgcggaaaaaaaacaggaagaggatggtgtaaccttacgtgtcgagcagtcgcagtttattaatgcggttgagctacttagacttaacggttatccgcataggcagtttacaacggcggataagatgtttccggctaatcagttagtggtatcaccccaggaagaacagcagaagattaattttttaaaagaacaaagaattgaaggaatgctgagtcagatggagggcgtgattaatgcaaaagtgaccattgcgctaccgacttatgatgagggaagtaacgcttctccgagctcagttgccgtatttataaaatattcacctcaggtcaatatggaggcctttcgggtaaaaattaaagatttaatagagatgtcaatccctgggttgcaatacagtaagattagtatcttgatgcagcctgctgaattcagaatggtagctgacgtacccgcgagacaaacattctggattatggacgttatcaacgccaataaagggaaggtggtgaagtggttgatgaaatacccttatccgttgatgttatcgttgacaggactgttattaggagtgggcatcctgatcggctatttttgcctgagacgccgtttttgagccgacctgatcccgaggtgttgcaactttatcgttatttctggcaacctgctcgttacgctgtaccggaatggctggataagctgggctttcatctttcaaactgctggcgttatggcgatcggcccgagttggatcgtcttcttgacagagcgttaaatagactaagaggaagctctgttattccagcctgtttaaatgacaggcaaaaacggcaggttcgtcttgcgccgcgtatatcggcatttgcctttgggctgggattattcaaactcaggtgtagtgactattttatgctaccagagtatcggcaattgcttctacagtggtttagcgaggatgagatctggcagctatatggttggttggggcaaagagatggcaaattacttcctccgcaagtgatgcaacaaactgcattgcagatcggtaccgccattcttaatcgggaagcgcatgacgatgcggttttacatgcgctattagtattattaccccctccgcagcgtatactttggccgaagacttctcttaccgagattatcttcatggagcatttgctatgagttttacttcacttcctctgacggaaattaaccataagctacccgctcgaaatattattgagtcacagtggataacattacaattaactttatttgcgcaagagcaacaagctaagagagtttcacatgctattgtgagctccgcttaccgtaaggctgaaaaaatcatccgagacgcctatcgttatcagcgtgaacagaaagttgagcagcaacaagaactagcgtgcttgcgtaaaaatacgctggaaaaaatggaagtggaatggctggaacagcatgtaaaacatttacaagacgatgaaaatcaatttcgttcattggtcgatcacgcagcgcatcatattaaaaatagtatagaacaggttctgttggcctggttcgaccaacagtcggtagacagtgttatgtgccatcgtctggcacgccaggccacggctatggcggaagagggagcgctttatttgcgtattcatcctgaaaaagaggcattgatgcgagaaacttttggcaagcggtttacgttgattatcgagcctggtttctctcccgatcaggctgaactttcctcaacacgatatgccgttgaattttcactttctcgtcatttcaacgcgttactgaaatggttacgtaatggtgaagataaaagaggtagcgatgaatattaaaattaatgagataaaaatgacgccccctacagcatttacccctggccaggttatagaggaacaagaggttatttcgccttcaatgttagctctccaggagttacaggaaacgacgggggcagcgctctatgagacgatggaagaaataggaatggcgctgagtggtaaactgcgcgaaaattataaattcactgatgctgagaaactggagcgcagacagcaggctttgctgcgtttgataaaacaaatacaggaggataatggggcaacgttgcgtccgcttaccgaagagaatagtgatcctgatttacagaatgcgtatcaaattatcgctcttgcaatggcgcttactgccggcgggttgtcaaaaaagaaaaaacgcgatttgcaatcgcaactggatacgcttacagcggaggagggatgggaacttgccgtttttagtttactggaacttggcgaagtggataccgctacgctgtcctctctgaagcgttttatgcaacaggcgatagacaacgatgaaatgcccttatcgcagtggttcagacgcgtggcagactggccggatcgctgtgaacgggtccgtattttgctaagagcagtagcctttgaacttagcatatgcatcgaaccctcggagcaaagtcgtttggccgcagcattagtacgtttgcgtcgtttgctgttattccttggccttgaaaaagagtgccagcgtgaggagtggatttgccagttgccgcctaatacattactgccgctactactcgatattatttgtgagcgctggcttttcagtgattggttgcttgatagacttaccgctatagtttcttcatcgaagatgttcaatcggttactccaacaacttgatgcgcagtttatgctgatacccgataactgttttaacgacgaagatcaacgtgaacaaattctcgaaacgcttcgtgaagtaaagataaatcaggttttattctgatacctggctttcaatatttaggtaaattggctttctggctcatcatgaggcgtcaggatggattgggatctcattactgaacgtaatattcagctttttattcaattagcaggattagctgaacggcctttagcaaccaatatgttctggcggcaaggacaatatgaaacctatctaaactatcataacggtcgtattcacttatgtcagatactcaagcaaaccttcttagacgaagaactgctttttaaagcgttggctaactggaaacccgcagcgttccagggtattcctcaacgattatttttgttgcgcgatgggcttgcaatgagttgttctccacctctttccagctccgccgagctctggttacgattacatcatcgacaaataaaatttctggagtcgcaatgcgttcatggttaggtgagggagtcagggcgcaacagtggctcagtgtatgcgcgggtcggcaggatatggttctggcgacggtgttattaatcgctattgtgatgatgctgttacctttgccgacctggatggttgatatcctgattactatcaaccttatgttttcagtgatcctgctcttaattgctatttatcttagtgaccctctcgatttatcggtatttccgtctttattacttattactacattatatcgtttgtcactcacaatcagcacatcacggctggtactgttacaacataatgccggtaatattgtggatgctttcggtaagtttgtcgtaggaggaaatctcaccgttgggttggtcgtatttaccatcattactatcgtgcaatttattgtcattacaaaaggtatcgagagggtggcggaagttagcgcacgtttctcgcttgatgggatgccaggcaaacaaatgagtatcgatggcgatttgcgtgccggagttatcgatgcagaccatgcccgtacattaagacagcatgtccagcaggaaagccgctttctcggtgcgatggacggtgcgatgaaatttgttaaaggcgatacgattgccggtattattgttgttctggtgaacattatcggcggtatcattatcgctatcgtacaatatgatatgtcgatgagtgaggctgttcacacttatagcgtactgtcaatcggagatggtttatgtgggcaaattccatcgctgctgatttcccttagcgcgggaattattgtcacccgtgtcccgggtgagaaacgccagaacctggcgacagagttgagttctcaaattgccagacaacctcagtcgctcatattaaccgctgtggttttaatgctcctcgctttaattcctggctttccttttatcactctcgctttcttttcagcgttgttagcattgccaattatcctcattcgccgcaaaaagtctgtggtttccgcaaatggcgtcgaagcaccggaaaaagatagtatggttcccggcgcatgtcctctaatcttacgtcttagcccgacgttacattctgccgacctgattcgtgatattgacgccatgagatggtttttatttgaggataccggcgtccctctccctgaggtgaatattgaggttttgcctgaacccaccgaaaaattgacggtactgctatatcaggaacccgtatttagtttatctattcccgctcaggcggattatttattgataggcgcggacgctagtgtggtgggtgacagccagacgttaccgaacgggatggggcagatctgttggcttacaaaagacatggcccataaggcgcaaggttttggactggacgttttcgcgggcagccaacgtatctctgccttattaaaatgtgtcctgcttcggcatatgggagagtttattggtgttcaggaaacgcgttatctaatgaatgcgatggaaaaaaactactctgagctggtgaaagagcttcagcgccagttacccattaataaaatcgctgaaactttgcaacggcttgtatcagagcgggtttctattagagatttacgtcttattttcggcaccttaattgactgggcgccacgtgaaaaagatgtcctgatgttgacagaatatgtccgtatcgcgcttcgtcgtcatattctgcgtcgtcttaatccggaaggaaaaccgctgccgattttgcggatcggcgaaggtattgaaaacctcgtgcgtgaatccattcgccagacggcaatggggacctatactgcgctgtcgtctcgtcataagacgcagatcctgcaacttatcgagcaggcgctgaagcagtcagccaaattattcattgtcacttctgtcgacacccgacgtttcttgcgaaaaattacagaagccaccttgttcgacgtaccgattttgtcatggcaggaattaggagaggagagccttatacaagtggtagaaagtattgaccttagcgaagaggagttggcggacaatgaagaatgaattgatgcaacgtctgaggctgaaatatccgccccccgatggttattgtcgatggggccgaattcaggatgtcagcgcaacgttgttaaatgcgtggttgcctggggtatttatgggcgagttgtgctgtataaagcctggagaagaacttgctgaagtcgtggggattaatggcagcaaagctttgctatctccttttacgagtacaatcgggcttcactgcgggcagcaagtgatggccttaaggcgacgccatcaggttcccgtgggcgaagcgttattagggcgagttattgatggctttggtcgtccccttgatggccgcgaactgcccgacgtctgctggaaagactatgatgcaatgcctcctcccgcaatggttcgacagcctatcactcaaccattaatgacggggattcgcgctattgatagcgttgcgacctgtggcgaagggcaacgagtgggtattttttctgctcctggcgtggggaaaagcacgcttctggcgatgctgtgtaatgcgccagacgcagacagcaatgttctggtgttaattggtgaacgtggacgagaagtccgcgaattcatcgattttacactgtctgaagagacccgaaaacgttgtgtcattgttgtcgcaacctctgacagacccgccttagagcgcgtgagggcgctgtttgtggccaccacgatagcagaattttttcgcgataatggaaagcgagtcgtcttgcttgccgactcactgacgcgttatgccagggccgcacgggaaatcgctctggccgccggagagaccgcggtttctggagaatatccgccaggcgtatttagtgcattgccacgacttttagaacgtacgggaatgggagaaaaaggcagtattaccgcattttatacggtactggtggaaggcgatgatatgaatgagccgttggcggatgaagtccgttcactgcttgatggacatattgtactatcccgacggcttgcagagagggggcattatcctgccattgacgtgttggcaacgctcagccgcgtttttccagtcgttaccagccatgagcatcgtcaactggcggcgatattgcgacggtgcctggcgctttaccaggaggttgaactgttaatacgcattggggaataccagcgaggagttgatacagatactgacaaagccattgatacctatccggatatttgcacatttttgcgacaaagtaaggatgaagtatgcggacccgagctacttatagaaaaattacaccaaatactcaccgagtgatcatggaaactttgctggagataatcgcgcggcgtgaaaagcaattacgcggcaagcttaccgtacttgatcagcagcaacaggcgattattacggaacagcagatttgccagacgcgcgctttagcagtgtctaccagactgaaagaattaatgggctggcaaggtacgttatcttgtcatttattgttggataagaaacaacaaatggccgggttattcactcaggcgcagagctttttgacgcaacggcagcagttagagaatcagtatcagcagcttgtctcccggcgaagcgaattacagaagaattttaatgcgcttatgaaaaagaaagaaaaaattactatggtattaagcgatgcgtattaccaaagttgagggaagtcttgggttgccatgccagtcttatcaggatgataacgaggcggaggcggaacgtatggactttgaacaactcatgcaccaggcattacccattggtgagaataatcctcctgcagcattgaataagaacgtggttttcacgcaacgttatcgtgttagtggcggttatcttgacggtgtagagtgtgaagtatgtgaatcaggggggctaatccagttaagaatcaatgtccctcatcatgaaatttaccgttcgatgaaagcgctaaagcagtggctggagtctcagttgctgcatatggggtatataatttccctggagatattctatgttaagaatagcgaatgaagagcgtccgtgggtggagatacttccaacgcaaggcgctaccattggtgagctgacattgagtatgcaacaatatccagtacagcaagggacattatttaccataaattatcataatgagctgggtagggtgtggattgcagaacaatgctggcagcgctggtgtgaagggctaattggcaccgctaatcgatcggctatcgatcctgaattgctatatggaatagctgaatgggggctggcgccgttattgcaagccagtgatgcaaccctctgtcagaacgagccgccaacatcctgcagtaatctaccacatcagctagcgttgcatattaaatggacagttgaagagcatgagttccatagcattatttttacatggccaacgggttttttgcgcaatatagtcggagagctttctgctgagcgacaacagatttatcctgcccctcctgtggtagtccctgtatattcaggctggtgccagcttacattaatcgaacttgagtctatcgaaatcggcatgggcgttcggattcattgcttcggcgacatcagactcggtttttttgctattcaactacctgggggaatctacgcaagggtgttgctgacagaggataacacgatgaaatttgacgaattagtccaggatatcgaaacgctacttgcgtcagggagcccaatgtcaaagagtgacggaacgtcttcagtcgaacttgagcagataccacaacaggtgctctttgaggtcggacgtgcgagtctggaaattggacaattacgacaacttaaaacgggggacgttttgcctgtaggtggatgttttgcgccagaggtgacgataagagtaaatgaccgtattattgggcaaggtgagttgattgcctgtggcaatgaatttatggtgcgtattacacgttggtatctttgcaaaaatacagcgtaaacctgataagaaaaataatatgcgaacaatataatagcgttccaggtcgtgtcatgagagatacagtatgtctttacccgattcgcctttgcaactgattggtatattgtttctgctttcaatactgcctctcattatcgtcatgggaacttctttccttaaactggcggtggtattttcgattttacgaaatgctctgggtattcaacaagtccccccaaatatcgcactgtatggccttgcgcttgtactttccttattcattatggggccgacgctattagctgtaaaagagcgctggcatccggttcaggtcgctggcgctcctttctggacgtctgagtgggacagtaaagcattagcgccttatcgacagtttttgcaaaaaaactctgaagagaaggaagccaattattttcggaatttgataaaacgaacctggcctgaagacataaaaagaaagataaaacctgattctttgctcatattaattccggcatttacggtgagtcagttaacgcaggcatttcggattggattacttatttatcttccctttctggctattgacctgcttatttcaaatatactgctggctatggggatgatgatggtgtcgccgatgaccatttcattaccgtttaagctgctaatatttttactggcaggcggttgggatctgacactggcgcaattggtacagagcttttcatgaatgattctgaattgacgcaatttgtaacgcaacttttatggatcgtcctttttacgtctatgccggtagtgttggtggcatcggtagttggtgtcatcgtaagccttgttcaggccttgactcaaatacaggaccaaacgctacagttcatgattaaattattggcaattgcaataaccttaatggtcagctacccatggcttagcggtatcctgttgaattatacccggcagataatgttacgaattggagagcatggttgaatggcacaacaggtaaatgagtggcttattgcattggctgtggcttttattcgaccattgagcctttctttattacttcccttattaaaaagtggcagtttaggggccgcacttttacgtaatggcgtgcttatgtcacttacctttccgatattaccaatcatttaccagcagaagattatgatgcatattggtaaagattacagttggttagggttagtcactggagaggtgattattggtttttcaattgggttttgtgcggcggttcccttttgggccgttgatatggcggggtttctgcttgatactttacgtggcgcgacaatgggtacgatattcaattctacaatagaagctgaaacctcactttttggcttgcttttcagccagttcttgtgtgttattttctttataagcggcggcatggagtttatattaaacattctgtatgagtcatatcaatatttaccaccagggcgtactttattatttgaccagcaatttttaaaatatatccaggcagagtggagaacgctttatcaattatgtatcagcttctctcttcctgccataatatgtatggtattagccgatctggctttaggtcttttaaatcggtcggcacaacaattgaatgtgtttttcttctcaatgccgctcaaaagtatattggttctactgacgctcctgatctcattcccttatgctcttcatcactatttggttgaaagcgataaattttatatttatctaaaagactggtttccatctgtatgagcgagaaaacagaacagcctacagaaaagaaattacgtgatggccgtaaggaagggcaggttgtcaaaagtattgaaataacatcattatttcagctgattgcgctttatttgtattttcatttctttactgaaaagatgattttgatactgattgagtcaataactttcacattacaattagtaaataaaccattttcttatgcattaacgcaattgagtcatgctttaatagagtcactgacttctgcactgctgtttctgggcgctggggtaatagttgctactgtgggtagcgtgtttcttcaggtgggggtggttattgccagcaaggccattggttttaaaagcgagcatataaatccggtaagtaattttaagcagatattctctttacatagcgtagtagaattatgtaaatccagcctaaaagttatcatgctatctcttatctttgcctttttcttttattattatgccagtacttttcgggcgctaccgtactgtgggttagcctgtggcgtgcttgtggtttcttctttaataaaatggttatgggtaggggtgatggttttttatatcgtcgttggcatactggactattcttttcaatattataagattagaaaagatctaaaaatgagtaaagatgacgtaaaacaggagcataaagatctggagggcgaccctcaaatgaagacgcggcgtcgggaaatgcagagtgaaatacaaagtgggagtttagctcaatctgttaaacaatctgttgcggtagtgcgtaatccaacgcatattgcggtttgtcttggctatcatcccaccgatatgccaataccacgcgtcctggaaaaaggcagtgatgctcaagctaactatattgttaacatcgctgaacgcaactgcatccccgttgttgaaaatgttgagctggcccgctcattattttttgaagtggaacgcggagataaaattcctgaaacgttatttgaacccgttgcagccttgttacgtatggtgatgaagatagattatgcgcattctaccgaaacaccataaatgcttttggtatgcttcttcaggccactgcgaaggttaagagggtaatagcgtatagagcagtgcttgacgataaaggtgagagactgaaaataatcgcttttagcctggcacaagcaccagatagcgtattataaaattaaacaagataatggattggtgcgtctgaatggactcgaaccatcgacccccaccatgtcaaggtggtgctctaaccaactgagctacagacgcattaaaatgatggtgcgttcaattggactcgaaccaacgacccccaccatgtcaaggtggtgctctaaccaactgagctatgaacgcaacgttgtaggtgacaacggggacgaatattagcgtcacaaccgcaatgaggcaagagggaaatcgcaattttcttcctgaaatcacctgattgcggtggaaatatgcaacatgtcgagaaaatagccgccatgcgacggctatcgtcgtattatcgcgcagcgcgctgcaaaatgatggcggacggctgacgttgtagatagcgcatccgtagcatcattaacaccgccgccgaggtcaggccgatgatgaaccccatccagaagcctgccggtcccatacgatccaccaccaaatccgttaacgccaggatataaccgctgggtaaacctaacacccagtaggcggtaaaggtgataaaaaagatggaacgcgtatctttataaccgcgcagaataccgctgccgataacctgtatagagtcggaaatctggtaaaccgcagcgagcagcattaattgcgcggcaagcgccacgacctcagggttgtcattgtagagcaaagcaatatgcttacgcagagtaacggtaaaaatagcggtaaccacagccatacaaatgccgacgcctaaaccggtacgcgctgcggtttgcgcatccagcgttgagccctggcccagacgataacccactcgaatcgttaccgccgcagccagcgacatcggcagtacgaacatcagcgagctaaagttaagcgcaatctgatgaccggcgacatccacaatacctaatggcgaaaccagcagcgcaacgaccgcaaataacgtcacttcaaagaacagcgccagcgcaatcggcaaccccagttgaatcaggcgcttcatgacgacgctatcgggtttgccaaagcctttttcattacgaatatcacgcattgaacgcgcgtgtttaatgtaagaaagcatggcgataaacatcacccaatagaccgccgcagtcgcaacgccgcagccgataccgccgagttccggcataccaaaatggccatagataaaaatatagttcaccggaatattcaccagcaggcccaaaaatcccatcaccatacccggtttggttttggccagaccttcgcactggtttcgcgctacctgaaagaaaaggtatcctggcgcgccccacagcagcgcgcgaagataacccacggctttatcggccagcgccggatcaatattatgcatagagcggataatgtatccggcattccacaggacgatcatcaccagcacggagacaaagcccgccagccagaacccttgtcgaacctgatgcgcgatacgctcacgacggccggagccattgagttgcgcaatcacaggcgtcaaggccagcagtaagccgtgaccaaacaaaatggcgggaagccagatagaggtgccgatagcgacggcagccatgtccgtagcgctatagcctcccgccatgacggtatcgacgaatcccattgcggtctgtgccacttgcgcaaggatcaccggtattgctaacgctaataactgacgcgcttcactggtatacttctgcacgtattcaccttttattttgttgttatatgaaagactaaaaagccgccgaagtggcagccaaaagaaatagcaggggaaatttcagtctattgtagcggggtattactatttctccagtgaaaaaacagttgttaacggcgcattgctggcaagctgtttttccacctgctattgtgctgaacagttctgcttttatttatttcaggagttgaagatatgtttacggggatcgtacagggtaccgcgaaactggtatcgattgatgaaaaacccaactttcgcacccatgtggtgacgttacctgactacatgctggaggggctggagacgggggcgtcggtagcgcataacggatgctgtttgacggtgactgaaataaacggtaaccagataagttttgatctgatgaaagaaacgttgcgcatcaccaatctgggcgcgttgagggtaggtgatgaggtcaacgtagagcgcgccgccaaattcagcgatgaaatcggtggtcatctgatgtcggggcatattattacgacggcggagatcgcgaaaatcctgacctccgaaaataaccatcaggtgtggtttaaagtgcaggatgcgtccctgatgaagtatatcctgtacaaaggctttatcggcgtcgacggcatcagtttgaccgtcggcgaggtaacgccaacgcgcttctgcgtgcatctcattccggaaacgttggaacgtactacgcttggcagaaaaaaactgggtgagcgtgtgaatatcgagatcgatccgcaaacgcaggcggttgtcgataccgtagaacgcgtactggctgcgcgagaaaatgcggtcagaaatcaggccgacattggctaacggaaaataagattcccccgcatgaaatgcgggggagatgattagcgaggaacgcgcagtccgttttcaacgccgcgcgtaaataccacctgccaaagctggatatcacgcgcgcgaaacgcacccgcgcaggcgttgagataatagctgaacatacgtttaaagcgctcgttataattgcccgcaatctctggccaggcattgataaagcgctcatgccacgccatcagagtcgtgtcatagtcggcgccaaagttatgccagtcttccattacaaagtgtgattcgctggcctcggcgatttgacgaacagacggcaaacaaccgttggggaaaatatacttattgatccacggatcgacattatgatcggtttttttagaaccaatagtatggagcaggaaaagaccatccggttttaaattcctgtcaacgacctcaaaataggtgttgtagttttttggcccgacatgttcgaacatgccgacagagacgattcggtcaaactgatcgttaaggtcgcgataatcttcgaggagaatggagacatccagaccttcgcaacgcgtctgcgccattttttgttgttcagcggagatcgttacgcccaccacgctaacgccataatgggtcgccatatattgcgacaggccgccccagccgcagccgatatccagcacacgcatccccggttgtagctgtagcttttcgcaaattaatttcagcttggcttgctgtgccgcttccagcgtatcggcatctttccagtaggcgcaagaatattgcatatagggatcgagcatacgggaaaaaaggtcattaccaagatcgtaatgttccttgccgacaatccaggcgcgttttttactttgtagattaatcagacgcgcgccgaggatacggagcgtatctttaacatggtgggggagttgattttcaagaccggcacgtaagactttgctgaagaaaatatccagacgctcgcattcccaccagccatccatgtaactctcacctaaccccaacgatccttcctgaaggacgcgtttaaaaaaatcgggattcttaacacgaatgtcagacggggcggaaccattaattgtaatatccgcgcgacttaacaattcgttggcgattcggtaccagttatcatccggtacgctgacttcttctatacacgatgaactcatagtttctccatcactggacggtgatcagaaccttaaaacagcgtagacgcttttttggctttgtgagaaatcccacggacaattccgtgagccagttatccgacgtagaacagaggaagggaggagcccttgccgaaaaggccatccatggtgaatcgggaacgctccggttcccgttaatgcctaataattatcgtaatataaacaaccgggaatcagtataggccgcaatttttgatgattcaaccgaaaattgttagcgtgctaattaccagcggttaacaagtctttagtgagacttgtcgtgggcgacattggcatggggaaatccggtctcagcgcaatctgcatgagactgcattttgtaacctaacgccgccagaacaacggtagagagcattacgctggtggtggtcagcagcggcgtgctgatgagccatgaaaccaccaggcttgccaggaaacataaccccagttgcagcgtattttgtagcgccgcagcgcgccccgtggcttgagggaaagggcgtaacgcttgcgcgacgacgatagggtagatggcaccattagcaatcgccattacgcagaaaggaatcaggatctccaccagtgaggcattattcagaaggcccgctccccaggtggcgataacgctcagcgcatacagccctaacagccacggaagcaattggtagccctgccatttttgtagcgccgcgcggcaaccatatccgccaatcagaaaagcgatggtttgcggaacatagctcaggccaatcactgccgggctgtaacccatcgcgctgagaataaatggggaccctgttagccacgcaaaaaagctggcggaacaggcggcataaatcagcacattaccgcgataggttttagagcgtaacaacgtcgcgaaagtgagtttatcctgtccttcggtacgcgcttttcccgatggttttaagcgcagcgctggcaacatcagcaacaacgtaatcacgaacagggtggcgaaaatcgcctgccatgagaaatgcgtcagtatccagcttcccagtaagggcgcaagcgccggggataagcccaccagtggcatgatcgtggcgaagatacggttaattttttgcgaaggataataatcggtcaccagcgcttgccagattaccgttgccgcgcaaacgccgacggcctgcacgaagcgcagcgtcagcagtgctgccgcgctttctacccacagcatccccagacttccgagcgcaaagatagataaccccagcagtaaaatcggtttacggccataacgatccgatagcggtccccaaagtagttgcgcgacggcaaagccagctaaaaacaggctgaggctggcgctgaccgcggcggcaggcgtttgtaaatccgcctgtatggcggcaaacgcgggtaggtacatgtccgtagccagaaatcccagcacgctaaggccggctaaccagactaaaaaaccttttccaggttgcatatttgtttctctttcttatcagacagacattgtcgcagagtgtagggagtgaaattacggttgtgaaacgttaatatttgtccagtgaattcaaaatttttgtaggcaaattatgtggtcggaatactcgcttgaagtggttgacgccgtggcgcgcaatggcagttttagcgcggcggcgcaggaactgcaccgtgtgccttcagcagtcagttacaccgttcgtcagttagaggagtggctggccgtaccgctttttgtacgacgtcaccgtgatgttgaactgacgcctgctggcgtctggtttttaaaagaagggcgttctgttatcaaaaaaatgcagatcactcgccagcagtgtcagcaaattgctaatggctggcgcgggcagttagctattgcggtggacaatatcgtcagaccagaacgtacccggcagatgatcgtcgatttctatcgccattttgacgatgtggaactgctggtttttcaggaggtgtttaacggcgtctgggacgcgctctccgacgggcgtgtcgaactggcgattggggcgacgcaggcgattccggtaggggggcgttacgcttttcgggatatggggaccctgagctggagctgcgtagtggcaagcgatcacccgctggcgtcgatgcctgggccgttaagcgatgataccctgcgcaactggccgtcgctggtcagggaagacacttcgcgaaccttaccgaaacggattacctggctgctggataaccaaaaaagggtcgtcgtaccggactgggagtcatcggcaacctgcctgtcggcaggactatgcgtgggaatggtgccgacgcattttgcccgacagtggatagacagcggaaaatgggtggcgctgacgttagagaatccgtttcccgatgcggcctgttgcgtgacgtggcagcaaaacgaggcctcgcccgcgctggcatggctgctggactatttgggcgatagcgaaacgttgaatcgggagtggctgcgggagccagaagaggctcccgacagcggggattaacgccgatagtcgcggaacgggccgtcagcgaccgagcgacgctcaaccaggcgtggatgaacttcaatagactgtgactcttcacgcttattgacgatgcgatccaatagcatattaaatgcggtttcgcctaaagagtctttgggctggtgaatcgtcgtcagcgccggggtaaagtaacgggcgttacgcacattgtcataaccgatcaccgaaacgtcctgcggtacgcgaagccccatttcgtcagccgcgcaaagcgcgcccatcgccataatatcgccgccgcagaaaacggcggtagggcgatgtgactgcgataaaatttgctgcatcgcgtggtaaccggattccggctcgaagtcgccctgaacaatccagttgtccggcacgttgatcagcgcctcctccatggctttcataaagcctgccagccggcccgcgccggtgttgcgctccagcgggccgggaataacgccgatatcccggtggccgcgctcaaccagataacgacccgccatatagccgcctgcaaaggcgttatcaatcaccgtgtcggtaaaatcggccttcgcctcgccccagtccatcaccaccatcggaatatggcgatactcttccagcatggaaagcagaggttctggatactcagaacacatcaccagcaggccatccacgcgcttttgcgccatcatggacaggtaggcgcgctgtttttccaggttattccaggcgttgcctaaaatcagcgtatagcctttctggaaacagtttttttcaaccgcctcgataatttcggcaaaataggccgcttcgctgctggtcgccagtaagcctatcgacttggtatggttaaccttcaggctacgcgcgacggcgctgggagagtagtgcagctctttaattgccgcccagaccgcgttacgcgtttcttcagcgacaaaacgcgttttgttgattacgtgtgatacagttgtagtggaaacgtttgcccgtttcgctacatctttaattgttgccattacatttcactccagaccctcgctaagctcctgagaaacgccaggtaaacgtttgcctacacacaccctaatcgcaacatcagggttgcggcacgccggaaaaacgacacggaacgtcaggaaggggtcaatggccgttacgctaattcagtaagcctggaattttgtctgatcttgaggaaaaggggaagcgttaaaaacagttatcaatataaaacatgagagatttttgtgcgggaatgtgcaaaaatgcgctatatcactttttgtgtgggaataaaaaggagaaaacttgatgagtaccgacctgaaattttcgttgattactacgctgattgttctgggcgtgattgtcgcaggtggattaacggccgctctgcactgatttcctctcttctgagggtgggcgtctcctctattctatccctctctaaaacgcagaaggcgtaccttctgcgtactcagacttatgcggcgagatttttcgcaacaaattcccagttaaccagcgcccagaaatgctccagatagtttggacgggcgttgcggtagtcgatgtaatacgcgtgttcccacacatcaaccgtcagcaacggcgttgcatccgtagtcagcggcgtaccggcatttgaggtagaaacgatagccagtttgccatcagcgctttttaccagccatgtccatccggaaccaaagtttttgatagcggcatcggtgaattgcgctttaaattccgcgaagctgccaaaagatgccgcgatagcatcagccagtttcccggtcggttcgccgccagcgtttggcgccaggcagttccagtagaaggtgtggttccacacctgagcggcgttattaaagatgccgccttcggaagtgcgcacgatctcttccagcgatttgccttcaaacgccgtgcctttgatcaaattgttaagattggtcacgtaagtctgatgatgtttgccatagtgatattccagcgtctcagcagaaatatgcggcaccagagcatctttggcatacggtaatgcaggtaattcgaacgacattgcttctctccttattattaatattgcgcacgcacaatacccctggtgcgcgtaaggatagggtagcaaattgagcggtggcgcaaaagaagaagttatcctgtcgttaaacgacaggataaaatattagcgaattgttttaggcgtcatcacccggcgggcgccgacataatgacgttgccagtattcttcgttcagtgaggtgatcttaatttcctgaccgctgcgcggagactggataaacttaccgttgccgacatagacgccaacgtgatcggcggtgccgcgcccctgcgtacggaagaacaccagatcgccgtttttcaactcgctacgctcaatgggcgccgcgtcacgcaggtgatacatctcattcgccgttcgggggatacggatcttcactaaatctttataggcataataaaccagaccgctgcaatcaaaaccggtgcgcggcgacgcgcctccccagtgatacggtttaccaatctgattcatgagtttggacatcgcggttttcgtcgctttttgtacttttgcacgatgcgcatcggcaatagagaccggcaatgttcctttccccttcacgcagtgcggcttacggcctttacgcgtcgtgcatttttccgttacgtcgagggcggcgattgacgtgggcgcggttctgttacgacgatgcgtcgtatgacgagatttcgtggaggcggtggtacgttttggcgtagaagcggaagaagaacggctggtttttgaggttttttttacgttttttttgctggttttactgatctttttcgttgtgcttttctttttatctgccgttttcgtgacatgagaaacagcaggcgtcgctttggcttgcctggaagcatgggccattggcgtaaaggggagagtagtaaaaagtaaagcacagagcgtgatcgagattttgtttatccgcgccactgagcaatcctctgttaaaggcaggcgattcatgcctgcgtatgatttacaaaacctgataattctaatctacaaaagcacagattggtaattgcttttggtttctgaagctgtgtttcgttaacagatgtaaaaaaatagcaattaatgctaaacacgaacgcgttatctacaaatcactgcgcggcaacccgcttaaaagatattttgtatacaacttattcccgcagacggtaaaataataaggcatgatgaaaatgttattttccgttgccagcctgacccgttacaatgacaggcttcagtcgtaaaagtagtttaaggaagcgagacaatgagcaccactatcgaaaaaattcagcgccagatcgctgaaaacccgattctcctgtatatgaaaggttcaccgaaactgccaagctgtggtttctctgcgcaggccgttcaggcgctttcagcctgcggggaacgttttgcctatgttgatatcctgcaaaacccggatattcgcgctgaattaccgaaatacgccaactggccgacattcccacaactgtgggtggacggcgagctggtcggcgggtgtgatattgtgattgaaatgtatcagcgtggtgagttgcagcagcttattaaagaaactgcggcaaaatataaaactcaggagccggacgcagagtaatctgtgcaaggagaaagcgacctgtaaaggtcgcttttttaccgccatcgtgagcaagagcggcgttgttagcctcgttatttgtccgtcggcaaaggtaacggccagccgcccaggcgcttccagcgattgacaatttcacaaaacagcaccgctgtccgctcggtatcatacaaagcggagtgggccttttcaccgtcaaactccatacctgccgccaggcacgcttttgataacaccgtttgtcccagcgccagtccgctcaatgccgcagtatcaaaggtgacgaacggatgaaacgggttacgtttcagcgaggcgcgctctgcggcggccatcataaaactgtgatcaaaagtggcgttatgcgcgaccataatggcgcggctacaaccgctgtctttgatacctttacgcaccattttgaaaatagcgtgtagcgcctcatattcactcaccgcgccgcgtagcgggttagagggatcgataccgttaaacgcaagcgcttccggctgtaagttggctccagcgaacggctccacatggaaatgcagcgtcatgtccggcatcagccagccttgttcatccattttcagcgtgatggcggcgatttcgagcagcgcatcggttttagcgttaaatcctgcagtttcaacgtcgatgacgacaggataaaaaccacgaaaacggtcgcacagaccggaaagttgagcgttatcggacatctgagtctcttaatacgaaaaaatgcagcgcgtattatggcaaattttacgccgggatgcagtaaaacaacgggcgcagtgacctgcgcccggcgggggatcagttacccagaccgcggcctgcgtctttagcttcaatcaattcgattttatagccatccggatcttcaacgaaggcgatgatggtcgaaccgccttttaccggccccgcttcacgggtcacgttgccgccgttctgacgaatgcgttcacaggcttcagcagcattgtcaacgctcagcgcgatatgcccgtacgcattgcccatgtcgtagctctcaacgccccagttataggttagttcgatgaccgcttcttccgtttccggaccatatcccacaaaggccagcgagtatttgtattccggattctcactggtacgcagcaatttcatgcccagaacgttagtgtaaaaagcgatggaacgctgcaaatcgccgacgcgcagcatagtatgcaataaacgcattttcgttgtccttaaaatagtcaagatattcaaagtatagcggcgatgtgaggccgctatcaatgaaattacagagtagggtagtcagtgtagccttccgcgccgccgccataaaaactttcgggacgctgtggattaagttccgctttacgttgcagacgcgctaccagatccgggttagcgatgtaatcacgaccaaacgccacggcgtcaatcagccctttttcgatcagatcttccgctttttctggcgtataggcgccagcgccgatgatgggaccgtggaaacgcgcgcgcactttttcacggaacgcgtcgctgtacggttcgccgcccgcccagtctggttcagacatatgcagataagcgatgccgcgtttgcctaacgcttcaatcagataaagggcgtcagcttcttcattcgggccgttatcgacattctggaaagtgccgacaggagaaaggcggatgccgatacggtccgcgccccattccttaatgccggcatcaaccacctccagtaccagacgggcgcgattctctacgccgccgccgtaccgatcggtacggtgattagaagacggtgagaggaactggtgcagcagataaccgtgcgcggaatgcagctccaccagatcgaagcccgcctctcgggcattggcgatagcctggcggaaatcgttgacgatcccggggatctcgtgagtatccagcgcgcgcggcgtggaagtctctacgcggatggcctggccgttttcgtcacgcaaagaggtgcgggttcccgcattgatagcggatggcgcgacgggcgcttgtccgcctggttgcaggctggcgtgtgaaatacggcccgtatgccacagttgcaccgccatatggccgccctgggcatggactccctgagtgatttttttccaggcggcgatctgctcatcgctgtgtaatcccggtgcgccggcatagcctttcgcctgtgcggagatttgtgtggcttcgctgatgatcaatccagcgctggcgcgttgacggtaatattccgccattaacggcgtaggaatgtcgcccggttcaatactccgcaaacgcgtcaaaggcgccataaatacgcgatttgtcgccgtgatggcacccaccttgaggggggtaaacagttttgctgatgacatagtggctcctgatataagtagaccggtcgtcttgtaataaaggaaataaaaacgcctgttactgctcaggcgttgcaatgatggtcttaacatgcgccaacgcattttccagcggcgcggcgctacgggatattttggcctgcaaattggcgcccagccacagggcataaagtacctgcgcctgtggcaacggctggccggtgaaatgtaaacagtggctattacggccatcttccagcgcgcgtgcaagcagtgccatgatctcctgcgcccctttatccatcgtagagcgcatatcctccgacagatcgcagacttccgctgacagtttcaccgtcaggcaaccgctgatggcgccttgctggcaaaactgctttaacgtttcctgataccaggcgagaagacgatcgcgatgattaccgggaccgcaggtgaagtgcgccgtaagacgctgatgatagcaggcgtaatgtcgctcaagcatggcgacgccgaaggcttctttcgagcgaaagtagtgataaaacgaccctttaggcacttgggcggttttgagcaactcgctaagccccatgccggtaaaaccccgttgcatacaaagctgctcgccggtggccagcagatgttcgcgggtatcgtgttcggtttgcttattcatagcaggcagtatagtagaccagtcggtctactacaagcagagttgccataatgtcagttagcgtcttcaatagtcataagcgtcaaacgttgaggaggggatgtggccgagcagttggagttttttcctgtagcaagcccatgtcgcggtatctgccagtctgatgagcgtggcttttgtcggggctgtatgcgcagccgcgacgaacggtttaactggcaaaaaatgagcgatgtcgagaaacaaaatgtactgcggctttgtcgccagcgtttcttgcgtaaaatacgcgcaaataagcctctcccatcggaagatcctcaacaaccttcactcttttaaacgcggaattgcgtatactcaacctcattattctctatgaggaatctgttatggttcagcgtgtcaccatcgctccacaaggcccggagttttcgcgttttgtcatgggttactggcgtttgatggactggaatatgtccgcgcgtcagttagtgagttttatcgaagaacatctggatttgggcgtcactaccgttgaccatgcggacatttatggcggttatcagtgcgaagcggcgtttggcgaggcgctaacgctggcgccgcatttgcgggaaaaactgcaaatcgttaccaaatgcggtattgcgaccactgccagagcggaaaataagctcggtcattatattaccgatcgccgccatattattctgagcgccgaacagtcattaaaaaatctggcgacagattatctggatatgttgttaattcaccgtcccgatccgttaatggatgcggatgacgtcgccgaggcgtttcaacatctgcaccaaagcggcaaagtgcgccattttggcgtttctaattttacgccagcgcaatttacgttgctgcaatcgcgcctgcctttcaccctggcgaccaaccaggtggagatctcgccggttcaccagcctttgttgctggacggcacattagatcaattacagcaactgcgtattcgtccgatggcctggtcatgtcttggcggcggtcggctgtttaatgatgaggcttatcagccgttgcgccaggaactttccgttatcgcgcaagaactcaacgccagttctattgaacaggtggtctatgcctggattttacgtttgccgtcgcagccgctgccgattattggctcgggtaaaatcgaacgcgtacgcgccgcactagaagcggaaacgctgtcattgacgcgtcaacagtggttccgaatccgcaaggcggcactgggttatgacgtgccgtaatcgccaactcgttgactttccgtacatgttttcgccagtggtttacacttaacaggcgaccacatgtaacggaggttttatgaagcgattaagtttagcgatggtgacgctgctggcctgtgcgggtgcgcaggccgccagcgagaaagtagagatgaatctggtgacggcgcaaggcgtaggacagtctatcggcaccgtcgtcatcgatgaaaccgaaggcggcttaaaatttaccccacaccttaaagcgttgccgccgggcgagcatggttttcacattcatgccaacggtagctgccagcccgcgattaaagacggcaaagcggttgccgcagaagccgctggtggtcatctggacccacaaaataccggcaagcatgaaggaccggaaggccaggggcatctgggcgacctcccggtgttagtcgttaataatgatggtatcgccagcgaaccggttactgcgccgcgtctgaagtctcttgatgaagtgaaagataaagcgctcatgatccatgtgggcggcgataacatgtccgatcagccgaaaccgctcggcggcggcggaatgcgttacgcctgcggcgtcattaaataacccggagccagtgttccctgcgctggagcctgttccagctgcgacagcgaacagtgtaaacgccagataatcgccgccagctcatgcgcggcgggttgatgatgatgtgcgagcgtgtcgcagatacgctgtagttcctgtagcgtgacggcaagcgggcgttgctgcacgccgcgctcgctcatcacatcgcgcagcagggatatacaaatatcccgcacccgggaaagcggatcggaacgcgactcccaggcgcgcagctgccacaccacatgcgagcagttcagcagcaccactccccaacgtaataaccaccggcgcgccagcgcatcctgactattgctgagctgactgacgtgatgataggtcagcgattcaaactcgctttcgttatgggaagggtgacggctaagctgatcgacgaaatcccggcgtagcgcgcggatatggcggcggctttttacggcatcggaaccggggcgcaaaatcgcaaacgccagccaggaaatcgcgacgccgacgatcttggcggtattatcgttaaggaagtcggcgaagtcgtacaccggtggattggtcacggcgatgaatgagcccataaaaacgataagctgcccccacagtcccgccagcttaggcatctgcagtttaagcagttgcatcgtgacgaacagcggaaaaaggaaaagcaagaattgccacagatcggtgatttgcaccatcaggccaaatttcaccacgaagctgaataaggacagcagcactaaagtacgcatcaataaggaaagcgacttaaacggcgtggcgacgatggagtagaggacgcaactgatcgccgccagggttaatgcgccgggcccggattcccattgcgcgccaatactccaggcgccaatcaccgtgagcgtgcaaaaggtacgcacgccgctccagatggcctctgcgttatccgtatgccgcgcaaggccgggagtgcggcggatatggatttgatccaccggcgcgccgctttcgatcagatataactgacggctgctgcgcagatatagctggcaaaaatagcgtaatcgctgccagaacgcgaggtgacgataatcctgttcatcctgcgggcgtagcggcgcaataatctgcgccacggtgtagctgtccgcgcgcggttttgccaactcagctaagagttgctcaatgacttcgcggctgttttccggcggcgtcggccagtttaaaagcattctacgcagactggagatcacgctggttaaccgtaattgctggtgtaacaatgcatttagcaatgcattctggcggcgaaaacggtagtgactccagaaggcctgaatacgcagcaggttcatggtcaggatttgcccaatgaccccctcatgcgcggagcggatagcgtcagtagtctccggctgccacagtagactggcatgttccagcaagcgcgcatgcatgtttttaaacgcggtgagcagggcggtaccatccgatgtgctgggtaggatcatcatcatcatgccgccacagaggatgccgacgataacttcacatacacgtgcctgggcgatatcccacaactgcgtgatttctacaatattaaccatcgggaacgcgatgatcgccgccgtgtagccggacaactggaaagcataagcggcattattggtaaaatgcgcgcaggcccaggtacaaaaaccgatccaggcggccatgctaaataagaacaaccagggttcattcagcgtatggccagcaataattaacgcggcggtcgcgccgagtaaactcccggcaatacgccccagacttttactgattacgccgcctacggtcggaaagctcaccactgcggccgaagtcattgcccagtagggctcatccagattgagataataagcgaatgtcagcgcgagacacatggcaatggtattgcgcaacgcgtaacgccactggccggaggtcgctttaaaccagggcgtatttcgcagggccggcagggagagtttcattaccgctgtccaatggctacgctgcaggtagtgccggagacgagcgtgatatcctgcggtaaagcgtcaaattcgatacgtaccggtacgcgttgcgccagacgtacccacggtacgttgggtttgatatcgggcactaaaccggagtcactttccacgctttggtcgtaaatagcgcgcccgatactgccaacgtgaccctgtaacttaacattgccactatacagtgttattaatgcaggctcaccttcgcggatatggcgtagtttggtttcttcgaaatatcccattacataaaatgaatggctatctaccagggcgaaaagtggcttaccggtgctggcataatcaccggtacgcgtggaaaggttggtcacccagccggataccggcgcttttacttccgtctggctaagctgccactgcgcctgttttaacgttgccagtgcgacatctacgttggcctgcatcgctttaacattcagattggcgctatccagatcttcagcagagatgtagttacgcgataaatgtcgacgtcgatcggcttcattattcgcttttgccagatcggactgcgctttggccaactgcgcctgcgcgttaagttctgcaatatggaagggcgttttatcaatgacaaagagaacgtccccggcgttgacgaactgattatctttgatattgagttgggtaatgctgccagaaacctgtggcgttacgctgacctgttccgcgcggattttaccatcgcgcgtccacggtgactgcatatagtaattccataaccaccacgcggccagaacggcgacgacggcgacaatgagagtagaaaaatattttattgtttttaacgacatatttaccacgcgatcagtaaaacgaggcccagacatacgcaaagcgtaaagagggagagatccattaacaggggatgccagatttcatcagagtatatccggtcacgcaggagtcggtgaataaacaaccagataacgaacccaagcgcaaaggctttaaagaatggcggaaagtaaacagatgctcccaacatgagatcttgtaagggcaatcctgtggcgttgagtatacacttcacaagcaatgttcctttgcgtcagacatcgatgctttagttttagccaaaactgaagctacaggtgccaagtgcgcactatgtctgaaaaaatgtctattggtaagcaaatttagcaatacatttgttttgagaatacaaatactgcacactattctaaaatcagcataataacttagcaagctaattataaggagatgaaattggaatcgccactaggttctgatctggcacggttggtgcgcatttggcgtgctctgattgaccatcgcctcaagcctctggaattgacgcagacacattgggtcacgttgcacaatattcatcaattgccgcctgaccagtcgcagattcaattggctaaagcgataggcattgagcagccatcgctggtacgcacgttggatcaacttgaagataaggggctaatttcgcggcaaacctgcgccagcgatcgtcgcgctaagcggattaaactgaccgaaaaagcggagccgctgatcgctgagatggaagaggtcattcataaaacgcgcggtgaaattttggctgggatttcttcagaggagattgagcttctgattaaacttatcgccaaacttgaacacaatattatggaattgcactctcacgattgaggtgcaggggcatacgtgtggccatgtgaccacacgtaaagcctggtttagcgtggagagacggtaacctggctgccgttgctggccagcacgacacgctgacctgccgagaaacgcgtatttccttgtttctgcacaaccataatggtgttgccatcgtctttacgaatttccagttccacaccctgggttttattcattgcgctctggacgccctggcccgctacgccgccagccaccgcgcctgccgcggtcgccagtgaacgacccgtaccgccgccgatagtgttgccgaggaatccgcccaacaccgcgccgccgatagcgccaatcacgttagaatcatcaccgccctgaatttgaaccggacgaacgttaacgatagtaccgtacgttacattctgaacttgtttagcctcggatgcggtataaacatcacccgaaaggctatcattgttaacacaccccgctagggataaccccatcagtgaaacggccagtacacgtttaatcatttacccatctcctgttcttcacgaaacgctatttcagcatccctatagctaaattatatggcatttatgcagttaaggtcatatcttctgccgaaagaatgtgaaaatcataatcagaagttaattaaccaatcttaaacgaagtcggaagcaagaaaagataggtcattgatatccgtggacgacacggcaaaaaatgtgacgtgggcatagcattacaaaatacgttatgccgagtgttaaggcttaacccagcttaaaaggaagaggtatgaaatcgggccgttttattggcgttatgtccggaaccagccttgatggcgtggatgttgtactggcggcaattgatgaaaccatggttgcgcaacaggcaagtctcacctggcccattcccgttcatctgaaaaaaggcattctcgatatttgccagggacagccgcttacgctctcgcaactcggccagcttgatacccagttaggccggctttttgcacaggcggttaatgcgctgttagcgcaacaacgtttgcagccgcgggatatcgtcgccattggttgtcatgggcaaacggtctggcatgaaccgaccggcgaggccccgcatacgctgcaaattggcgataataatcacatcgtcgcccatacggggattacagtggtcggcgattttcggcggcgggatattgcgctgggcggacaaggcgcgccgttggtgcctgctttccatcacgcgctgttgggacatccgacggaaaaacgtatggtcctgaatatcggcggcatcgccaatttatctctgcttttccccggacaggcggtgcgcgggtacgacacggggccgggtaatatgttgatggatgcgtggatttggcgacaatgcgcgcagccctacgacaaagacgcggcatgggcgaaagaaggtcaggttattcttccattgctgcaaaagatgttgcgcgatccgtactttgctgcgtcggcgcccaaaagtacaggacgcgaatatttcaactatggctggttagagcgccatcttgcggctttccctggcgcagacgcgcgcgatgtacaggccacgctggcggagctgacggcggtctccatcgcccaacaggtgctgctcaacggcggctgcgagcggctgatggtctgtggcggcggtggccggaatccgttagtgatggcccgtctggcggcgctgttgccaggtatcgaggtttcgaccaccgataaggcggggatcagcggcgatgatatggaagcgctggcctttgcctggcttgcctggcgaacgctcgcgggcctgccgggaaatttaccttccgtgacgggggctacagaagccagtgttttaggcgctatttacccggctaacccaataactcagagttaactgaatttttcccggaccctatatcggtaaactagcaaggtcaggaaggggcgtttgcccttccagaagcaggagagctttcgggatatgcctatgaaaaagatcgcaataatgtgtttacctgtgctgctgaccggctgtagcgtttatcaacaatttgttgaacgtatgcaaacggatacgctggaataccagtgtgatgagaagccgcttaccgttaaagtcaataacccgcgtgaagaggtcagttttgtttatgacaataagctgctgaccctgaagcaaggaatctcggcctcgggcgcgcgttataccgacgggatttatgttttctggtcgcaaggcgagagcgccacggtctataaacgagacagaattgtgcttaataactgtcagttacaaaatccgaagcgttgagattttcagtatgggggcgcacaatagcgccacccactgattatttctgatcaacgccatgtctgataacgaccaattgcagcagatcgcgcatctgcgccgtgaatacacgaaaggcggcttgcgtcgccgcgatttacccgctgaaccgttaaccttatttgagcgctggcttgggcaagcgtgcgacgccagactggccgatccaacggcaatggtcgtggcgaccgtagatgacaagggtcaaccgtaccagcgtattgtgttgctcaagcattatgatgaaaaaggcctggtcttttataccaacctgggaagccgcaaggcgcatcagattgagcacaatccgcgtatcagcctgttatttccctggcatatgcttgaacgccaggtgatggtgacaggcaaagccgagcgtctctccactcttgaggtggtgaggtatttccacagccgtccgcgcgacagccagatcggcgcatgggtctctaaacaatccagccgcatttccgcgcgcggtatcctcgaaagcaaattcctggagctcaagcagaagtttcaacagggcgaagtgccgttacccagcttttggggtggttttcgcgtgagtatcgaacagatggagttctggcagggcggcgaacatcgtctgcacgatcgctttttataccaacgcgacgacggcgcgtggaaaatcgaccgtcttgcgccctaaagatgcaaaaatcttgttttaagcactggtgcggatgaatccgccgttttatgctatgtctctttcgcgtctggcgaaaagtcgtgtaccggcaaaggtgcagtcgttttatacatggagattttgatggcaagcagtaacttgattaaacaattgcaagagcgggggctggtagcccaggtgacggacgaagacgcgttggcagagcgactggcgcaaggcccgatcgcgctctattgcggcttcgatcctaccgctgacagcttgcatttggggcatctggttccattgttatgcctgaaacgcttccagcaggcagggcacaaacctgttgcgctggtaggcggcgcgaccggtctgattggcgacccgagcttcaaagccgccgagcgtaaactgaacactgaagagaccgttcaggagtgggtggcgaaaattcgtaaacaggttgccccattcctggactttgattgcggcgaaaactccgccatcgcggccaataactatgactggttcggcagcatgaatgtgctgactttcctgcgcgatatcggtaaacatttttccgttaatcagatgatcaacaaagaagcggtgaagcagcgtctgaaccgtgacgatcagggtatctctttcacggagttctcttataacctgctacaggggtacgacttcgcttgcctgaataaactgcacggcgttgccttacagattggcggttctgaccagtgggggaacatcacttccggtatcgacctgacccgtcgtctgcaccagaatcaggtatttggtttgaccgttccactcatcaccaaagctgacggcacgaaattcggtaaaaccgaaggcggcgctgtctggctggatccgaagaaaaccagtccgtacaaattctaccagttctggattaacaccgcagatgccgatgtttatcgcttcctgaaattcttcacttttatggacattgaagagatcaatgccctggaagaagaagataaaaacagcggtaaagcgccgcgcgcgcagtatgtgctggccgagcaggtgacgcgcctcgttcatggtgaagagggactggtcgcggcgaaacggatcaccgaatgcctgttcagcggttcactgagcgcgctgagcgaagctgactttgagcagttggcgcaggacggcgtaccgatggttgaaatggaaaaaggcgccgacctgatgcaggcgctggtagacgccgaactccagccgtcacgtggtcaggcgcgtaagactatcgcctccaacgctgtcactatcaatggtgaaaaacaatccgatcctgaatacatctttaacgatgaggaccgtctgtttggccgctataccttattacgtcgcggcaaaaagaactattgtctgatttgctggaaataaggcattaagtaacagggagtgagaaatcactcccttatttttgatgttcaggtaaaaaaatgaagaatatcctcgctatccagtcccatgttgttttcggacatgcgggcaacagcgccgccgaatttcccatgcgccgtcttggcgcgaatgtttggccgctgaataccgttcagttttctaaccacacgcaatatggtaaatggaccggctgtgtcatgccgcccagccatctgactgagattgtccaggggattgcggacattggccagttagcgcactgcgacgccgtacttagcggttacctgggatctgccgagcagggagaacacattctcggtattgtgcgccaggttaaagcagcaaatccgcaggcaaaatatttctgcgatcccgtgatggggcatccggaaaagggttgtatcgtggcgcctggcgtcgcagagttccatgtgcgttatgcgctacccgccagcgatattatcgcgcctaacctgattgaactggaaattctcagcaaacatagcgtgaataatgtggatgacgccgtgcaggcggcgcgtgaactgattgctcaggggccagaaattgtactggtaaaacatctcgcccgcgccggttacagttcagaacgctttgaaatgctgctggtgacagcgcaggaagcctggcatattagccgtccgctggtggatttcggttcacgtcagccggttggcgttggcgatgtcaccagtggtttattgctggtcaaacttttgcagggcgcgacgttgcagcaggcgctggagcacgttacggcggcagtctatgagattatgatcgccaccaaaacgatgcaggagtacgaactgcaggtcgtggcggcccaggacaggatcgctaaccctgaacattacttcagcgcaacgcggctgtaattattgctgctaaaaagaggccggatggcggtacagcgagctatccggcaacatgacattaattcagtccttccgctttaagcgctgccgcaacggtcggtctttttgcgacacgctgcatataactttcaatatgcgttaacccgtccatattcagttttacgccataggcccaacgcaatacggtaaacagataagcgtctgcaatggtaaaacgctggccgcaaatccactggtcgtctgaaagcgactcatccacatactgcaatttcttttccagaccggcgcgaacggcgggtttgagtgtttccggcgtgtcagggcggaacagcggggtaaagcctttatgcagttccgttgcaatatagttgagccattccagcgtatgatagcgagcaagactacttaccggcgccagaagctggcggtcgggaacgctgtcggcgaggtactgcataatggcgacgccttcagtcaacagtgtgccgtcatccagcagcagagccggaacctgtcctttagggttgactgccaggtaatcatcaccgttttccaggcgtttttttgcgagatcgacgccatcaagcgtaaagtctttgccaatttcgcgcagggtaatatgggaagcaagagagcaggcacccggtttgtagaacagtttcatcggtaactcctttttgctgaggtttaaagtatggtagtgcggggacgagcaaaaaaaaagccgctaacgcacagttagcggcctgaatgttgtttcccggaaaattaaactgtagcggctttagagcctttttcagcggtatcatcgtcctgggtcatacggttcagcttaggcgctgtcagcagcatcaggacggcgataacggcggttgctatgccaatctgcataaatacgcgaccatagacttccagggacatcagtgggtcagtcacgtcgctcggcacagccatcaggttggcgacataaccgccgatgatgttagcgcctgccgttgtcaggaaccagctacccatgatgaaacccatcagacgctgcggaaccaactgtgcgaccattgccagtcccagaccggagatcatcagctcaccgatactttgcaggccgtagcttgcgatcagccagtttacggatacgatgccggcatcgttcgcaaatttggcacccagcggcagaatcaggaacgcgccggaacacagcaccataccaatggcgaatttcatcggcatcggcagcgtatcgcccatcctgttatagatagcggccagaatcgggctgccgataatgatccagaatgggttcagcgcctgatactgttccggttcgaacgcgataccgagaatagagtgctcgacgttacgaatggcaaagaagttcagcgacgtcggcatctggctgtacagtacgaagaagataatcgcctgcagcatcaaaataaaggcgacgatcattttacggcgagccgcgccgtgcatggaaaacgcttctttaccgaagataatgacgatgccaagagcgattacgcccagcaccatacgtgcgatatcctggttgtgcagcagccaggtggcgaccgcaatcagaacgacaatacccacgatggtcagcagcagattacggaagttgatcggttcaaagtcgggtttggaaccgtagcttttcacccagcgctggcagaaagcaaagttaacgacggttatcagcataccgacgacgctaagcgcaaacgcggtgctccagccataacgcgccgccagccacggcgtcgccagcatagagaagaaggagccgatgttgacggacatataatacatcgtaaatgcgccgtcgagacgcggatcgtccttcgcgtaacaggtagacagcagggaagacgggttagctttaaacagaccgttacccacagcgatagccgccatgcccatatagacgatgccagcgtcatgaccagaccatgcgaccagcgcataaccgatagccagcaccacggcacccagcataataacgcgtttggtgcccagaattttatcacctaaccaaccgccaatggcgaccaggccgtacaccagtgcactgaaggaagagaaaagggtgatggaatccgcttctgacatacccagttgttttaccaggtagacggccataatgccttgcaggccgtaataaccaaaacgctcccataactctatcgagaagatgagatagaacgccttcggttgtttgaaagcgttcaaactgacgctttcagttggttttttgtttgcagtagacacttttacctcttttttacgccccgtattaacagggattgtctggcgcgtgatgagtcagactcatccgtccgattgttatattggaggggaaacggcaggtaatgttcactatctttcctctccagacaagagctttgtaataatctgttacatataactcttctggttgaatcgtccgatgtcagaaatgttatccagcgttaaatttcttcatttgaagaatggcagatttttacactgcaaaaaggccattagtttgggtgaaaggcgatatcttctgctatttaaggtgaaaagcagtgatataggccattatctgaaaaaatggcagagtaatgttttgtagtgaaaacggggcgtcagtctatccggttgtaaatgtaaccttagatgtcattaaatttcacatgaagttatcaaagtgatcctgatcacggatagatagaattttttgcgattaaaaaaatgattaacctgacgtggagtgaaaacgaaagcacattacatcagaaaaaggacagagactggaatgattgatggctaaaatagatccaggccgaaggtgggagcgcgctggcgtgacggacgcactccgaccatatcaaatatcgactttttctttgtattcgcaaagatcttcaatgaggcaggagccgcagcggggttttcgggcgatacaggtatagcggccatgcaaaattaaccagtgatggcagtccactttgaactcattcggcaccactttcagcaacttctcttctacctgctcgacatttttacccggcgcgaactgcgttcggttgcatacacgaaatatatgcgtatcaacggcgatggtcggccagccgaaggcggtatttagcaccacgttagcggttttacgccccacgccgggaagcgcttccagcgccgcccgatcctccggcacttcgccattatgcttgtccagtaaaatacggcaggtcttaatcacgttttccgctttactgttaaataagccgatagttttgatataggatttcacgccctctacgcccagctccagcatcgcggctggcgtattggcgaccgggtaaagtttggcggtagccttgttcacgctgacgtcggttgcctgcgcggaaagcaacacggcaatcagcaactcaaacggcgacgtgaaattgagttccgttgtggggtgcggattgttgtcgcgcaggcgcgtcagaatttccagcctttttgctttgttcatcagactttccctgtttcacctgccggaacagcggaaggcgcggtttcggcgcggcgtttcttcattttttcatcaataagatattttaccgccagcatgagccccaggccgataaacgcgcctggcggcagcatcgccagcaggaaaggcgagtcggtgtgaaatatctcgacccgtaatacttttgcccagcctcccagcaggctatccgcgccatcgaaaagcgtaccattcccgaggatctcgcgcagcgaacccagcacgaacatcgcgcctgtcgcgcccatgccgatggaaaaaccgtccaacgcggaaagccacggtccttttttcgcggcaaacgcttcggcgcgaccaacaacaatgcagttcgttacaatcagaggaataaaaatccctaaagactgatacaaaccgaacgcatacgcattgatcagcatctgtactgcgcttaccaccgaggcaatgatcatgacgtaaatcgggatacggatttctgccggcgtccagcgacgtagtgcggacaccgtaaggttggtcagcgttaataccagcgttgtggccagacccagccccagagcgttggttgccgtagacgtcaccgccagtagagggcacaggccaagtagctgcaccagagcagagttatttttccataacccctgaacaacaatgtcttttatttcgctcatggctattctccacaggcggttaaatgggggagctgagcgggcagtgattcggcgtacagccccgcgcgtttaaccgcattcactacggcgcgcggcgttattgtcgccccggtaaattgatcaaaatcaccgccatcttttttcaccgcccagtgcgtatcattttcaccactgatggttttaccgctaaagtgggtaatccagtcagacaaacggcgctcaattttatcacctaaccctggcgtctcatgatgttccgtcacacgcgtccccaggacggtaccgttgaaatctgcgccaacaataagctggatagcgccggaatagccatctggcgcggtagcctcaatgatggccgctacgggtttatcatccttgcgagcgataaaaacacggtgtgtgcctttgccgagggcgggcgcatcgaccagataacaactctcttgcagattattattgtaacgatctggcggcaatacctgatcgaacagggcatgttgttgttgcagcgcttgttcgtggatggttgattttgtcatctgattaatcaccgcggtcaatcccgtagagcctgcggcaaaaagcgccagcgtaataccgtgtttacgaatcgttttcagcatggtttatcctttgcgatgtccatagacgcgggggcgcgtgtagtagtcgatcagaggaaccgtgatattcgccaacaggacagcaaaagcaacgccgtccggatagccgccgaagctacgaatcagccacactaataccccagccagcgcgccgaaaattaaacgtccacggttggtcgtggaggcggtaaccggatccgttaagataaaaaatgcacccagcatggtggcgcctgacagcagatgaagctgcggcgaggccagcgtagcgggcgagaaaagccagcctaacgcggcgcatagcgccagcgtcagcagaaaactgaccgggatatgccagcggatggctttttgccacagcaggaatacgccgccgacaagccaggcgaggttaacccactgccagcccacgccagccagcgcgccgctgtatatcgggtactgcatgatttgctcaacggagtgcccggcgcgcaaggacgttttaaacgtatccagcggcgtcgcctggctgataccgtcaataccgatacgtagcagcgtcatatcgccgccgctggcggtatgcccggtaaaaatcatccgcaacgtgtccagcatatcgggcgttgttgcggctatttcataaggcggcaaccagcttgtcatttgcaccggaaaggaaattaatagcaccacgtaaccgatcatggccggattaaaggggttttgtcccagcccgccatataactgtttagcgataataatggcgaatccggttcccagcacgaccatccaccagggcgcaagcggagggatgctgaccgccagcaaaagccccgtcaataacgcggaataatcctgcaggtgactggcgaccgattgtttgcgcagcctgaggacaatggcttctgcgacgagcgccgtgatagcagccagaacgatctggaaaagcgttccccaaccaaaaaaccacgtctgcgcggcaatccccggcagagcggcgattaataccagcaacatgattcgcgatgtctggcgctggttatgggtataaggcgagcttgcgattctgaataccatttaatcctcgttaacaacctgctgctgtgctgctttttttgcctgaacgcgggcgatagccgcagcaaccgcggctttacgcgggtcggccggttcggcaggttcgcttccggcctgctgctcctgcttacgggctttggcgcgagcgatggccgcttccactgcggctttgcgcggatcgatcggttcggcaggttcgcttccggtctgctgctcctgcttgcgggctttggcgcgggcgatagccgcttccaccgcggctttgcgcggatcgaccgcttcggcaggttcgcttccggtctgctgctcctgcttacgggctttggcgcgggcgatagccgcttccaccgcggctttacgcggatcgaccgcttcgaccggttcgcttccggcctgctgctcctgcttacgggctttggcgcgggcgatggctgcctccaccgcggctttacgcggatcgaccggttcggcaggttcgcttccggcctgctgctcctgcttacgggctttggcgcgggcgatggctgcctccactgcagctttactcgggtcgtcgccgggtatcgcgctgtcagccatcggatgagcggcttgtttagcgcgcgcttgcgctttacgcgcttcacgggccgcgatgacggcgctattgtctggctgactacccgcctgaataaccaccggttgcgtggcctgcgcctgtttctcttttacccgcgccagcgcagcggcaatggcatcctgatcttttgccgctggttgtaccgctgcgctcttgtgacgtgcaaggcgggcggctttttcgcgctccagtcttgcctgacgagcctcaaaacgcgctttggcttcggcggcgcgtttttcttcaagcctgatcgcattaatctccgctttttcctgacggaaatattggacgagcggaatattactcgggcagacccaggcgcaggcgccgcattctatacaatcagcaatatggtgagcggtagccttgtcatgctgctgccctttgctgaaccaataaagctgctgcggtaaaaggtcggcagggcaagcgtcagcgcaagcgctgcaacgaatacagcttttctcttcctgaggcgctcccatttcagtcacggatggcgccagcaggcagttggtgatttttacgaccggtacgtcaagccagggaagggtgaatcccatcaacgggccgcccatgatgaccatctggtcagcagaagggcagaacccggcatcgttaagcaaatgacgaacgggagtgccgagccgcgcccagacgttacccgggcggcttaccgcttcacccgttaaggtgacgacgcgttctgtgatcggttcgccgtcaatcacggcgcgtttaacggcatacgccgtaccgacgttttgcatcagcacgccaatatcagaggagcgcccgccgtggggaacctgttttcccgtcagtattcgggtgagctgttttgcgccgccggaagggtatttggttgggatcacacgtaacgaaatatcgtgggcgtcagccagtacggcgcgcagcatggaaatagcctgcggtttgttatcttcaatgccgattaatacctcacgcggttgcagaatatgcgccaggatgcgaataccttccacaatctgcgcggcgcagtcctgcatcaaacgatcgtccgccgtaatgtaaggttcgcactctgcggcattgataataagcgtggtgattttatcgccgccgccctgcaatttaacgccggtgggaaaccccgcgccgccaagcccggcaacgccatactgatgaatgcgttcaatgagcgcttcacggctgtgggcgcggtaatcagaccagccctcgcgttcaatccagcggtcctcgccgtcggcatcaatgattacgcttaactccgccagcgccgaaggatgcgccgtcgagtggggggcaatagcgataaccgtcccggaggtgggcgcgtgtaccggcagcattctcccacgtccacgggtaagcgcctggccgcgtagcacgcgatcgccgacgctaacgcacagctcgccctcagcgccaatgtgctgttttaaagggataacaaagcgcggcgctaaaggcacctggcgcagcggcgtgccgtttgactgggtcttcatttcgggcggatgaataccaccgtcgaaatcccagattttatcttttctgaaagcggaaaatagtttaagcatgttgttccacgggaatgatgcgaacgggaatggtgttcaaatcccatttccaactgtcgggcgtctcattcaccggacgtaattcgatgcagtgcgtcggacacggatcgacgcacagattacagccagtacagagatcgctcatgaccgtgtgcatggcgcgcgttgcgccaacaatggcgtcaaccgggcaggcctgaatgcattttgtgcagccaatgcagttattttcatcaataactgccagcatacgtactggcgcagcctgctgttcttcaccatcgcatggttgcggctctacgtttagcaactctgcaattttcagcatgacggcttcgccgccgggcgcgcaacgattgattttctcgccctggagacccacggcttcggcgtaggggcggcagccgggatagccgcactgaccacactggctctgcggcaaaatcgcatcgattttttcaacaaccggatcatcttcaaccgcgaatcggcgggaggcataacccagaatggcgccgaacaccagacccagaagggtcagggcgccaacggcaatccagatagtattcattacaacttcaccaaaccactaaaacccataaaggccaaagacattaatcctgcggtaatcaatgctatcgcgttaccacgaaaaggggcgggcacatccgccacggcaaggcgttcgcggatagcggcaaacagaaccatcactaatgaaaaaccgacggcggcggaaaatccgtacagcgccgactgaagaaagtgatgaccgagattaatattcagtaacgctacgcccagaaccgcacagttagtggtaatcagtggtaagaagatgcctaacaagcggtataacgccgggctggttttccgcacaaccatttcggtaaattgcacgaccacagcaatgacgaggataaaggctagcgtccgcagataaatcagatccagcggaataagtatccaggtgtcgataagccaggcgcatatcgacgccagcgtcatgacaaaggtcgtcgcgaggcccatccccatggcggtttccagttttttggatacgcccataaagggacaaaggcccaggaatttgaccagtacaaagttattgaccagtacagttccgacaaagagcagcaggtaatcagtcatgtttcggcctgaaataaaaaagccgcctattatctgtcaaactaccacaggcgacaacaggttaactgtagggttattacggattaacaaacgttgttttaacgcgcgctgaacgtttgagataaggcacaatgagcgccgttgccaacagtgggaagagtaactgacgcacggcaaaggcatctgagacgggcgaaaaggcaaatgctttaaccgccagtaacaccgacaccagcagccagataatgtaatgcttcggcacgcagcgtctgcgcttgaagaatgcgatcgtcaaccacagggtatagtaccacatggcgatagcggtaataaatgaaatgccccatagcagtaaattaccggtttcctgtccgctaagcgtcttgaacgtttgcggtgtggcaagcgccataacgtagagtaataacgccagcgaggcgctcaacaacgcgactaacagccaggctaacgggccaagaagccagcctccaattcgttgtggcggtgttgtagtcatatcttctccggggttacgcgcattaacggtcatgccgctcattttggggcaaatattataaggtttttgatgttaaacgctactttctttattgcacatagcgccagacggattgcggaacctgacctacatcaaacaggcgtcctccggaaaccagttcggcacggcggtgatctgcagcgcgatacatattaacaatgtccatgtcatcagtaagggtatagttaaggtggtcgaacagtttttccagactttcgagcgaactaattttgcggaattttaatagataatcctgaacagtcatataaagttgatccatattaaatataatgccaacggagtagtcactgataaaaaataaacaaaaccgcaccagtgagaggtcaggggtgcaggtaaaaagggaatattcttaccggtaaagagtcaggcgccacatggcgcctggggcgaaaggttaacgcgctttcctacaacaggcaataaacgtcagaccagataggacatatttcgttttttttgccggtttttgacttttctttgcaccccccggggcgccgcttaccgtaccacgcgaaaatgcctttacattatctgacgcttacttcttctggacggaagccgtgggctctggtggttggtaattgtcaatatggttggcaatacctaaaagaatgactgagataacgagaactatccacccagttaattcaataagacgattcattattgacgacatttgctttgatttatccataaacacagggggtaaatgttactttcctggcgaacggtcggcaagagggagggaaacgttttcagcctctgttctgtaacaagttaatcatttgatgctacgttgatggtcaggacgctattgcggctaatcgcacgatggtgtggaatagcgatatctaaaaccggaggcagtgagatgaatgataaaatccgcgttgggttaatcggttatggctacgccagtaaaacctttcatgcgcccttaattatgggaacgccagggctagagcttgcggcggtatccagcagcgatgaaacaaaagtgaaagcagattggccggcggtttccgtggtctctgagccccgacatttatttaacgatccgcatatcgaccttatcgtgatcccgacgcccaacgatacccatttcccgctggcgaaagctgcgctggaagccggtaagcatgtggtggttgataaaccctttaccgtgacactgtcacaggcgcgagaattggatgcgcttgcgcggagcactggtcgggtactttccgtcttccacaaccgacgctgggacagcgattttttgacgctgaaggccttgctggcggatggcgtgctcggcgaggtgtccttgtttgaatcccactttgatcgcttccgtccccaggtgcgcgaccgctggcgcgagcaaggcgggccgggaagtggtatctggtacgatctggcgccgcacttgttggatcaggccattcaactttttggcctgccggtcagcatgacggtggatttagcgcaactgcgtccgggcgcgcaatctacagattatttccacgcgattttatcctacccccagcgccgcgtgattttgcacggtacgatgctggccgcggcggaatccgcgcgatacatcgttcatggttcgcgcggtagctatgtaaaatatggcctcgatccccaggaagaacggttaaaaaacggcgagcgtttaccgcaggaagactggggatacgacatgcgtgacggcgtattgaccctggttgagggagagacgcgcaaagaagaaaactggcttacgttgccgggtaactatccggcatattatgccgccatccgcgatgcgttaaacggtaacggtgaaaatcccgtgccagcaagccaggcgattcaaattatggagttgattgaactgggcatggaatcggcaaaacatcgcgcgacgctgtgtcttgcctgagatgtcgcatttctccgcctgggatagcattaaaccgcaggcggagagagggcgttagcatcaataaagcaatcttacgcctcggccactttttcgcgcagcgcacgtttttcgctatcgctcagaaaggcgatttccagaccgttaatctgcgcctggcgaatctgttcgcggctcaatcctgccgctggcgcggcgacgtgatattcatggataatatctacgccctgaacagccggatcgtccgtattaagactggcgagaacgccatgctcaaggaaggttttgagtggatgatccgccagcgatgcgacggtactggtctgaatattcgaggtcagacaggattcaataccgatacgctgctgtgcaagaaaatccattaacgcgcgatcttcgacagcttttacgccatgtccgatacgttcggcccccagttcgcgaatcgcctgccagatactttccggccctgcggcttcgccagcgtgaacggtgatatgccagcccgcatcgcgcgcccgattaaagtgcgacaaaaacagactgccgggaaagcccagctcatcaccggctaaatccagcgcggtgatgttctctctgtgcgccagcagcgcatcaagctcctgtaaacatgccgcctcgccgaaggtacggctcataatgccaatgagtcgtgcctcgacgccaaacgtgttacagccgtcgcgtacgccgtcgataacggcttcaaccacgcctgcgattggtaactgatgcgccatcgccatatagccgggcgaaaagcgaagctcgacgtaatgcaggccgttacgtgccgcatcttcaatattttcaaaggccacacggcggcaggcgtcaagcgatgccaggacttttaccccccaatcgagtttagtgagaaagcttactaaatcgggttcggttgaggtgacctggacatgcggaatcagcgtttccagcgtttgggcgggaagggcgatgttgaactgccgaccaagatccagaattgtttgggcgcgaatgttgccatcaaggtggcggtggatgtcagtcaaaggaagcgtaatatcaatcatgggcgcactcaatttttaataaaagtgcgcaccattatactacagattgataatgctctggaaattttgcaaaaacggagtcattacgttgcaacttcgcgagagcgcgggagaaattttgtatcattctctttaacgcgcccccggtcagctcacgggggcgtctctgttatcgcctctcaggataaagggtcaaccccccgcctgtagacagtatcagcgaacggtgcggtggcaaaatccatatccgagatcgtaaaggggagcagatcggcttcgccaaaacgatcggcgacataatcccactacgtacaccatgtcccgcgtcggtcaacttcctgtgaaaaatcgaacatatcccttccttatgcctgaacggtattcatcaggccaaccatttcatcttttaccgactgaacctgcgggccgataattacctgcaaattatgctgattgagctgtacgatgcctgtcgcgtgattgtccttcaatgcctggacatcgacaaacgacatatctttcactgacaggcgtaggggggatgcagttgtccagactcacgatgttttccgtgccgcctaatgctcacgacgagcaccatgtgcggagtcaaacgatagccgctcgcctggtaacgcaaaagtagaggctgcgcgtcgttcggcgcagaccgggtgcagcgtcgcgacacccggcaaggcgattattgttgaggcagcgccggaacgtccggaacggaaagcgccggcatcccaaacaggccgacaaagtcttccaacggcattttttgtccgttgagcgtgatctggccattggcgtactgcaaactggaggcgatagtattatccttcagcgttgtcagtcggaacatctgacccattgcggacagcccctgcacctgctgttttgccagtttttccgcatcatcctgctgatagccttccagttttgctatctgcgtcataaactcgaccgccatgtccattggaattgccagtttcgcatccagcgatttcacggagcggtcgacttcctgcgccagcgtttgtggttgtgccgttgtggttgccggatctttgaggaacagcgacagattcagcgtggtttcccctttggcgtttttccagctaagcggcgccagagtcagtaccggatcgccttttaacagcacggggagagcgctaaagaacgcttcggtgactttttgctgataaagctcaggattctgcgccacgtccggctgattcagcagcgcctgcgtttgcgcatgatattgctgactaaactggtgccaggcttcgccgtcgatttggccgactttcagcgttaatttaccgctgcccaaatcctgattctgcactttcaggctgttaagcgagtaatccaactggctgttaatggtttttccgtcgttgacgagatcggacttgccggtaatttccatcccttccagcaccgccatctctttaccctcaatggcgatggacagtttatccagcgttaacttttggtcgcccacacgttcgccaaagcttgccagtttactggtaccgtcggttttcaaattattaaaggtgagttggaccttctgattatattcgttaacggcatcgaccaggccgctctgcgcttcgcctgacagcgaaaccacattaccgtctttatcggcgttaagccggaactcgccgccgctaaaggcgaccttttcaccggcattctcgtagtttaacggcttgagagagatatcggagcgggtatcgccgccataaccaatgcgggtattgataacaaagggcgcgtcgcctttcgcaatatcaaagaggggttttgccgcatcgttattcaccagagtggtttttaccgacgccatagaagggatcagattgagcgttttgagctgggcgagcgggaaggggccatgtgaaacggactcgtccagcacaatgctttgcccgggcttcaaccaggtattgtctgcgccggcaaccggtttgacaaccagttgcagatggctactgaacacgccgcgctggtagttttgataacttaattcgacaccggcctccggcgcagtacgcttgagctgttcattggcctgagtcaccatttctgcaagatggttctccagctttttccccgtataccaggcgccgcctgtccagacgatgccaagtgcaattactacacctgcagctaccagtgtttttttcatatcaattgtccataaaaatgaaaccaggcggattaaaccgcctggaggagttttacgtctgttataagcttagcaagagttgttaaaaaattcagtacgttgctacagcttgttataaacacgcgctaaacggcccgtgccgctggcgttaaccggagactcatccgcgccgataaaggcagattcacccggcttcagtaccagacgctgttcatctttacgtaacaccgcctcaccctcaacgcagaacagaatcgcggcgctgtgttggccgatgctcgtctcctgaagcgccaggtcgtgcagtgaaaaagcaaaatcgtcaaccggaattgggaagtccagctccgcgccgcttttcaccggggcagtcagcaactcgccggcaggcttaggttcgaacttcacgttcgcgaccagctcagggatgtcgatatattttggcgtaaggccagcgcgcagaacgttatcggagttcgccatgacttccagcgcaacgccctgcagataagcatgaggcgtttcagcaaacaggaacatcgcctcgccgggattcagtttgaccacattcagcaacaaaggagagaaaagcccgctgtcgtcaggataatactctgaaatcacgcggatcgtttgccacggttcgccttgctggctgttaagcgccgctttgagtacggctaacgcgcgggatttttcttcgccttgcatattcaacaggctggcgaaaagctggctcagacgttcagcattcggcacctgcaaaaagtgggcgatagcggaatgcgcgccggcgacaggttgcagtaaagagacaatgtcagaaaattcgcggaacgcgttcatcgccaggaaaggcgtcagggcaaaaaccagctctggtttatggttaggatctttatagttccgctctgcggcatccatggggatacccgccgcattttctttcgcgaaaccgatttcggagttgcgtttattcgggtgcacctgaatagagagcggttgtgcggcgcacagtactttaaacagaaacggcagttcgccgaaacggttggctaccgcttcgcccagcatggcggttttattcttttcgatggcgtcacgcagggagacggtttcgccgttggcggtggtgattcgcgagctgcttttgggatgcgcgcccatccagagttcagccattggctgctgctgcggattggcgatgccataaagttccgttaacgcagttttacttccccaggcatagttttgcactgagttaatgagtttttgcattatcaagccctgtttcaatgtggagatcaatgggaggtattaaaccaagaaacccgcatgaagtaacctccgggcgtaaaaagtcgtacttgtctcagtttttgttaaaaaattgtgtaggatagtgttactcgctttgagtcgggcaatggaacacctgcccagagaataaccataccgagcggtaagtgagagcacaatgtcaaacaaacccttcttttatcaagacccttttcccctcaaaaaggacgataccgagtactacttgttgaccagcgaacatgtttccgtcgccgaattcgaaggacaagagatcctgaaagtcgcgccggaagcgctaacgctgttggcgcgtcaggccttccacgatgcgtcttttatgctacgtcccgcgcatcagcagcaggtggcggatattctgcgcgatccgcaggccagtgaaaacgacaaatatgtcgcgctgcaattcctgcgaaactccgatatcgcggccaagggcgtgttgcccacctgccaggataccggtacggccattattgtcggcaaaaaaggtcaacgcgtctggactggtggaggtgatgaagcggcgctggctcgcggcgtatataacacctatatcgaagataacctgcgctattcacagaacgcggcgctggatatgtacaaagaggtcaataccggtactaacctgccggcgcagatcgatctctacagcgtcgatggcgatgaatataaattcctctgtatcgctaaaggcggcggatcggcgaataaaacctacctctatcaggagacaaaagcgcttctgacgccgggtaagcttaaaaattatctcgtcgataagatgcgtacgctgggcaccgccgcttgtccgccgtatcacatcgcgtttgtcattggcggcacctcggcggaagcgaacctgaagaccgttaagctggcctcggcaaaatactatgatgcgctaccaaccgaaggcaatgaacacgggcaggccttccgcgatattgagctggaaaaagaattgttgcttgaggcgcaaaatcttggcttaggcgcgcagttcggcggcaagtatttcgctcacgatattcgtgtcatccgattgccgcgccacggggcatcgtgtccggtaggtatgggcgtgtcctgctccgcggatcgaaacattaaagcgaagatcaaccgggacgggatctggatcgagaagctggagcgcaatcccggtaaatatattccagaggcgctgcgccaggcgggagagggtgaggcggtgcgcgttgatcttaaccgtcccatgagcgagatactgcaacaactgtcgcagtatccggtatcaacgcgcctgtcgctgaacggcacgattattgtgggccgcgacatcgcgcacgctaaactgaaagaacggatggacagaggcgaaggtttgccgcagtacatcaaagatcatcctatctattatgcggggccggcaaaaacgccggaagggtatgcctccgggtcgcttgggccgactaccgcaggacgaatggactcttatgttgatcagctccagtcgcagggcggcagtatgatcatgctggcgaaaggcaaccgcagccagcaggtgaccgatgcctgtaagaaacatggcggcttctacctgggcagtatcggcggcccggcagccgttctggcgcagggtagtatcaagcgcctggagtgcgtggaatatcctgaactgggtatggaggctatctggaaaattgaagtggaggattttccggccttcattctggtggatgataaaggcaacgatttcttccagcagattcagtcatcgcagtgcgcgcgctgcgttaagtaatgtcgccgccctgcggggcggtaacatgattcgctattttgccggagaacggcgcaagcgccttatccggtctacaccgttgtgttgttatcgttaatactcataagaccgcaaacatgtgagcaatgtcgacacatgatctcatcaacttgagtaaggagcaggtaatggtaacggtacgccgcgagaaagattcaatgggcgcgattgaagtcccggcagataaactgtggggggcgcagactcaacgttcgctggagcattttcggatttccacggagaaaatgcccgtctcgctcattcacgctctggcgttgaccaagcgcgccgctgcgaaggtcaaccaggacttagggttgttggcggcggaaaaagccagcgcgattatccaggcggctgatgaagtgctggcgggaaaacatgctgatgagtttccgctggcgatttggcagaccgggtccggtacgcaaagcaacatgaatatgaatgaagtgttagcgaaccgcgccagtgaaattttgggcggcgttcgcggtatggaacgcaaggtgcatcccaatgatgacgtcaataagagtcaaagctcaaacgatgttttcccaaccgccatgcacgtggcggcgttactggcgttacgcgaacaccttatcccgcaattatccgcattaacggatacgcttcgcgataaatcccacgctttcgccgatattgtcaaaattggccgtactcacctgcaggacgcgacgccgctcaccttaggccaggagatttccggttgggtagccatgctggaacataacctcagacacattgagcacagtttaccgcacgtcgcggaactggcgctcggcggaaccgcagtagggacagggcttaatacccatccggaatatgcccggcgcgtggccgaggaactggcgacgattaccgcggcgccgtttgttaccgcccccaataaattcgaagcgctggcgacctgtgacgcgttggtacaggcgcatggcgcattaaaaggactggcggcctcgctgatgaaaatcgccaacgatgttcgctggctggcgtccggcccgcgttgcggcattggcgagattgctatcccggagaatgagccaggcagttccattatgcctggtaaagtgaacccgacccagtgtgaagcggtaacgatgctatgttgccaggtgatgggtaacgatgtggccatcaatatggggggcgcatcgggcaactttgagctcaacgtctatcgtccgatggttattcataattttctgcaaacggtgcgcctgctggccgatggcatggagagttttaataaacactgtgcgtcaggaatcgagccaaaccgcgagcgtattacgcagttgctgaatgagtcgctgatgctggtcactgcgctgaatacgcacatcggttacgataaagcggcggagattgcgaagaaggcgcataaagaagggctgacgctcaaagcctcagccgtggcattaggataccttagcgacgaggagttcgacgcctgggtacgtccggagttgatggttggcagtatgacgccgggacgttaatccgccacatacaggtgcagtcgcggaataatcagtcgcagcggctgcgcctgtggtttaaaacggtgctgaatattgtcggcgtcatagttttccagcccgccaatatccggcacgccagcgccgttgtccgtgttgattaatgcgataatcggcgtggggcaggcgtgttgcacctgtttctgctggcctttataccagatgcgggagatcggctgtactttaaccggacgcttaatcttgagtcgggcctgctgcggtaaggcagcgatatcctgatattcccgttccagcttgaattgccattgttcgcgcgtccacggcgggacgctgcgcggcgacgcgaggctttttttcaactggctcagaacctcatcccggcttaaatttttaataatatgtttatttgcccagccgaaacgtatggtggcggggttattgataagcgtcagcgtgcggtaagcgttcagcgtaattaagccgggtagatgccgatgcacccactcaaaacgtgccgctgagggaagaccggactctaccgtaaccatctgctcgaaggtggttttcaactggttaatgcgctgtatctgattttccagatctaactgtgtcgcattatccacttgatagcataagacgccaggcaggcggacggcggctttactgctgcggttttcggactgctgttgaataaacaaatggcgatagtgacgtagcgccagcgcttcggcctctttccccagatgttgcgttacctcgatagtatccagcggcgcatgttccgcctctttggtcacctgcggcagtgaaaagacacgggcgataagtagcgaatgctgctgtagattatccgtcagcgccgccaggtgttgttctatctggcgaaaagtgccattcaggcgttcaacgagatcgtagcgggacatggtatcactcactttagttacaacatactatatgtatagcacagttcccgccgctcaaccagcgtgcaaaatgcgtcaggcagcggtcatgtcgggcatcgcgtgccagaccggccagcgaaagctaaattttgcgccgcccagttcgctctcgtcacagacgacgctaccgcccatcgccagggcgatagagtgtacgatggcgagtccaagcccgcagccgcctgtcgcccggtctctactggggtcgagtctgacaaaaggttcaaatacgcgctctcgcgcatccgcttcaatgccggggccatcatcttcgactatcaacgttgcctgactgccgtcgagtaacagactgacctgaacggtggtatgactgtagcgcaacgcattattcagcaggttatccagcactcgcgacattaaccgcatatcaagcgcgccataatcgccgattacacatgtgacaaggtttacggcacgttccggggtcacgctctgcacatcctgcaaatgcgcgagcaaccaggcggggaggtcgggttcggtcaacatcagttcattttgtggtcggtcaaggcgcgcataggtgagcagttcttcaatcagcgcttccagttgaccaatatcgcgattgagcgcctgtgattccggcggtgtcagattttcactcatttcaagccgatagcgtaaacgtaccagcggcgtgcgaagctcatgggcgataccgtcaatcagctgttttttactggcgatcagggcattaatgttatccgccatctggttgaacgcgacgcccagacgttcgaaactggagccattatcgaagtgcaggcgttcagtcaaatgaccctcgccaaagcgctgcgcggcggattcgagcctgagcatttcttgccagtgcgggcgcatccagataaacacaggaaaggcgagagaaaaggcaatgagcgccattaaggcgatatccagcagtcgcatttgatgcaggaaatagagatagggaaccgggccaaccgccaggacgtaatggctgcgcgggatacgctgaataaaggtgtattgatcgtcaagcgcgacaatatcgccttcacgcagtcgctgcgtggtggcggcatcaagcttatagtgatttaacggttcaacgcgtaaatcgaaagagaggttcaggtccatctcttttaacgttttcccccattcacgcggcggaatttcccgcagttcgctgcgcatcagatagagcgaacttttcatcagatcgtcgagcgattgcctgcccgcgcgttcggcggtgaatttgtacaccagtccgaccaataaggtcatgaccagaaaacagacgaacagcaaaaggtaaaactgcacaaacagctttttcatcaacgcccaccggatctcaatacattagctctatcgcgcgctgacgaaaaagatttcccgtcagcgccgctggtgggttataaaagcaggctttgcgtcaactgacaacctcattgtccggcgttaaggtccggactttcgtgaacaatgcgtccatcgacaagcgtcaaaacagcgcgaatggtatcaattctgtcttccggcatcgtcataaatggctgattgagtaccgccagatcggcctgttttccgacgcgaagctggccccggtgttgttcggcaaaggcgagccaggcggcatgacgtgtatataacgctagcgcttccagacgcgtgagccgctcgctggcgggtttacgcacggaaccgcctgacgctataccggtgatatgatattcgatagcgtgccagacaccggcaatgccaatacgcgtcgaatcggtaccgccagctacgacaagccctttatccagcgccagtcgaaccggcggcgaattgtccgtcgcgccgggtggattggcgtcacggatggcaagcccctcaaagtaaggccccatttgcacagtgtatgccagacccagcttacgcattcgctcaagcgtctgtggcgaaccggtattcagatgcgcaatagaccaacggagagggcgcagatcgtactgctgagctacctgctcaaaaatcgtcaatatcgcgtcggcgctatcatcggtataggcgtggatctcaagcggtattccccgttttgccgcaaatgtcgcgacctggcgaagcgcggttttgtcctgctctgaggaagaaaaccctggggccatccgcacgccgtcattcattccggccaccaggctttcccccaggccaagaaaagccagttgcccgtcatcggcacgcgccgggcgaaaggccatcaggttgctgaaccactgcgcttcatgacctttcgcttctggctgtaccggaatgcgataccccacgcgcagcggtaaatccccctggtttcgcattgcaaataaaggctcataagcggcggcaggcccggcagaggggtcaatgatgccggtcacgccgcgagcgttcatatcagcgaaaaattgccgcagaccaccctcacgatcggcgttacgacttatgctggcaaaaagctggttaaacgcggcgatgtcaccaaataatttccccgtggcgctaccttttgcgtcgcgctctacgcggattcccgctaaatcaggaggaggggtgttgttaaggccaagtacgtctataccgcgctgattcactaacgcatagtcgtaaagatactgaatataagccggatgatcgggaagggcgtgactcagttcggctaccgtcggcgcccggttttctgcaaattgcgccggtatccacgatcccactacggctacccattgatcgtggggacgacggttagcgtcggcgcgtaatttatccagcgcgtctttaagcgaagggctgtcgtaccagtaggtttcgaatgtccaggtttgtccgccgcgaatggcgtggatgtgagtatcggtcaggccgggtatcacggttttaccctgtaaatcgatggtacgggtatggtcgccgcgccattcatttgtcgccgtatcatcgccaatcgccacaatccgcgagccggaaatcgccagcgcgctggcctgcggctgggcatcattcagagtgatgatattaccgttatgcaaaataatatccgctgccgggcgggcggcggtggctgcgcctgtggccgtgagcagaaagagaagcgcggttctggaaagcagagacgggacgagactgatcattagcatgttccttttgtcgggcgataagcaaaccatagagagcgaacaagaattgttcaatctgtgcccagggaactgtgcgttctgtttttagaacggtggtgatgaaaaaagaaaagcccgccgaaacggcgggcttgagaagaattaatgaataattagaactggtaaaccatacccagcgcgacgatatcatcagtgctgataccggcatctttatagaactggtcgtcatcatccagcaggttgattttataatcaacataggtggagaagtttttgttgaaatagtaggtagcacctacatcagcatatttaaccaggtctttatcatcgccattaacgttgttataggtcaaatctttacctttagacatcaggaaagaaaccgccgggcgcagaccgaaatcaaattgatattgggctgtaacttcgaagttttgcgttttgtttgctacgcatgagcgacaatcgtcattgccgtaaggcgtcatattacgggtttctgaatacattgtggccagatagatattattagcatcatatttagcgccaacagtccatgcatccgctttatcaccgccagcggtagagtaattaacctgaccattagtacgatcggaagtggtatatgccgcgccgaaacttacgcccatacccagatcataagttgatgagataccgaagccgtcaccgttagcgttcttcacgttacgatcgccgccgttattagtgccttcctgctcatgagaaacctggttttcattggcaccctgatattgcaacgcgaagttcagaccgtctaccagaccgaagaaatcagtgttacggtaggtggccacgccgttagcacgaccggtcatgaagttgtcagcgtaagtgtaggagtcgccgccgaactcaggcagcatatcggtccagccttctacgtcgtacaggacgccgtagttacgaccatagtcgaatgagccgtagtcgccgaatttcaggccggcgaatgccagacgagtccaggaattagcaccttcgccttcggtagtgttagcctgaacgttatattcccactggccgtaaccggtcagttggtcgttaatctgtgtttcgcctttaaagccgacacgcatataggtctgatcgccatctttagaagagtcatcagagaaatagtgcaggccgtctactttcccgtaaaggtccagtttgttgccgtctttgttataaatttcagcggcgtgtgctgcgccagcagccagcagagccgggatgacaagtgccaatacttttcttttcatttttttatccttaaaaacttaacttatttgcaaaagattgaacttctacagattcgttgaatcaaaggcatcctaatctgaataatattatttcagcaaatgctaacttttcttatatgttattaattaatacaaaagttactatcggaaacgcatatatttatggtgaatatatttgttattatgtattcatgtatgtgatttgttttatttcacaatttgcgaaaaaagatggcaatatagcggcgggcagacattctgttatcaattttgtgaactggcttcgagtttttttaatttaactttcttgagcgaaaaagacgtaatcatgaaccacaacgcagagaaaacggtaataaaggggccgtttcgactaataaaaatagcattcatgtatgcaatgtctgttttttgaacagtggcggtgatgagcatcgccactatgacttgataaaggcaggtaaaatctgtcggctaacttatcccgtcgtttcgtcccaggcatgaggggcaaaaagatagcctttattgcgaatggtctttatacgatagggctcagcagcgctatccagcagtttcttacgcaggcgggaaatcgctacatccacgctgcgatccagaccatcataattgacgccgcgcagcgtttttagcaacgcgtcgcgatccataatttgtccggcgtgtgtcgccagttcccagagcaattcaaaatcggcggtggagagcgatatgaaatcgccattgagctggaccgcccggttaaggggatcgatggttaacgcgccaaaacgcagcgctttatgcggcgtaagcgcgctctcctgaagactttttgcctgttgcgtttgttcgctttgccgcaggtgtaagcgcagacgcgccagcaaaacggccggaggcgtggttttgaggatgtagtcgcaggcgcccatctccagcgccagaatatgattcatatcactgtccagcgaggtgagcaggacaatcgggccttgccagcggtggcgtaaatcgcgacatatcgtcatgccatctttacctggaagcataatatccagtaaaaccagatcgggctgagtggtgaggataagatcctccgcccggtcaccacgcggctcaacaatgacatcaatatcatgtttcgccagataagcggcaatgagagaacccacttcagcgtcgtcttcaacaaatacaatgcggttcatattataaatggagaatagaaaacgccaacatacaccgcctctgttttcccttccataaatattttctaaacgagagcggttccgttatgctacacgctgttgttattagcgtgttaaggcaaggtaatgggactcgtgattaaagctgccctgggggcgctggtcgtcgtattgattggtctgctgtcaaaaacgaaaaattattatatcgccggattaattcctctgtttccaacgtttgcgcttatcgcgcactatatcgtggccagcgagcggggcatcgacgcgatgcgtaccaccatcgtctttagcatgtggtcgatcattccttatttcatttatcttgcaacgctatggtatttcagcggcgtgatgcgcctgcccgtcgcgcttggcggtgcggtggtctgctgggggctaagcgcgtggctgctgattttttgctggattaaatggcattaatattggcaaagaccgtggtttccccatcgtaatacagacggatattacgatggggaggttgtcaacccaccagcatccacgtagccggaaccgccgcgaccagcaataaaccaatcagcacgacttcctgacgatttaacacgttgtcatgcttgtgcgtccgacgcgcatacaggaaaaccagtaatccaggcgcgtacagtacgacggacagcagcaggtgcatgggacccgacgcgtataacaaccataagccataaatacaggctccgataccgaccgcccgatggaggggacgtgttgcaatcttcagcagaaatgcgccgaccagaaagtagggcaccagaatcatttctgacgcaatcgtcaatagcgtgttgtagtccgaaccggtcagccagatcagcaccagacagatttgcacacagatattggtgagccataacgatgcagaaggcgcgccttgcgcattttgtcgcgcgaagatgcccgggaaggatttataggctgccgccagaaatggcacctccgccgccataatagtccagcttagataagccccgcagacagacacaatcagtcccgctgcaataataatttctccccacggccccatcatttttaccattagtccggccatcgacgggttacgcatctccgccagttccggacgcgcaagaacgccaagagaaagcagcgtgaccaggagatatattcccagcgccgcgaggaccgccagtagcgtggcgcggcctacatcgcgtttatttttcgctcgggccgagacgacgacggcgccttcaacgccaataaacacccacagcgtaataagcatggtgttcttgacctgttcccatacgggaataccgagttcaacaccagtgaagtccagtgtgaaggtatccagtttgaacatcatgatagccagcacaataaacgcgccgagcggcaacagtttcgccagagtcgcgaccagattgatgctggctgccgtttgtacgccgcgcaggatgaggaaatggacaatccagagcaagactgaagcgccgacaatagcctgccaggtattaccgtcaccaaacagacgcaaggcaggcgtatcggtaaagaaactcagcgctgaaaagacgataaccaaataggatacgttggcgatgaccgcgcacagccaatagccccaggcagaacaaaagccaatcagttcgccgaagccttcgcgggcgtaagtaaagataccgccgtcaagctcggagcgaatgcgcgtaaggattaacatggcgaatgccagtaagagtatccccacgccggtaatggcccagccaattaacaacgcagccggactggcaacggcggccatattctggggcagactgaaaacacctgcgccaagcattgagcttaaaaccagcgcggtcagcgcgctcagtcccagttttttttccattggtatccagctataaaaatgaaattggaagaataattattatggcaaaacgcataaaaatggtgaaagccactaaggcgcgggattttacggagagaagggaccgcatgcaacggcctggataagatttatcgccaaaaaagcgaaaagtgagattcatcgcgatatttgacggaactggcatcccgcgagaaagtgccggatggcggcttatcaggcctgccgttgaacgatcgtgtaggcctgataaggcaggtatgccgccatccggcgagaaagcctgatggcgacgcgcgccttatttatagaggtcggcgctgatggtgatgttattaccgcgctcctgccactgacgcgtaatatgataatacttagcgcctttcttcgccgcgcgtttggcgacctgataggagatttctgtcatattgccgtagttgccggtgaacttaacgctgtcgaaaggcaccatcatcgcagccgtcgctttattcagctcctcaacttttgtgccatccggaagtgtgacagtgtaacgtccgcctttggaggattgcgtttcgaagaaacggcctacttcggcgctcggcgaggctgacgtggcgacgcctggaatttcgactttcttcgcagcttcgccgccctgagccagcgcggcgcggccagcttcagagtctgccggaatagcgtccgggctctggacgatgcgttttttcgcatcttgtttatagataaatgcagtgatgcgctggtttccgccctgattcgcatctatctgacgaacaatatagaaagcgtatgcgcctttttgtttcgccgctttcgtaatggcatcgttaacttccggctggctacggtagaagccctgaacggtgacggtgtcatacggttctaattgtacggcctggtctttcggtaattccacgatgccattaatgacacgatttttgggcgcgtcggctttcggcgcgtcggctttatacacgtccgccacaacacgccagttaccactgttgccgaactccgaggtgtcgacaacatagaaggaggctgcgccttctttatctgcgcggcgggacacggcggagaccgcatcgccaatagcattaaaacgaccggtaataacgatgcggtcataaggttttagtgcagccgcttgctccggcgtcagttctgttgctgcatggacagaaaaagcagccgcagaaagcagagccgacgccaggagagtgttcttaagcttcataaaaataatccttcgccttgcgcaaaccaggtactggtattgttattgactagaaacgtggctgattattgcatttaaaccatatggatgtctgcgggatttttcacgcatcgtgtcatgtatcctatctttgatgataacatttgccgatatgtcgaaaaaaacggcgtccgggcggctaagctaatgaagcgcataaatttaataagttaatttaatgttaatttcttgatcgcgccaggggtttaatgatgttttgctgtcaaatttgagcgaattatcagccctcgcaggccattttcaaggcattatggctgcttagcggctgaatcgttcatgttttgcaaatttgataaaaaattctgttttttggcgctagatcacaggcgttattttcagtaggttatagagagtttgtaacggttttattctgctggggtaacatttacctcaaacgcgggcaggcgtacgcttctcgcgcttactgacaaaccatcatcaaaaatatcgatggaagggaacatttatgcgaattggcataccaaaagagcggttacccaatgaaacccgtgtcgctgcgacgccgaaaacggtagagcagctactgaagctggggtttagcgtcgctatcgaaagcggggcgggtcaactggcaagttttgacgacaaagcgtttgcgcaggctggcgcggatattgtagacggcaatgctatctggcagtcggaaattattctcaaggttaatgcgcctgaagaagaggaaatcgctttactgaaccccggaactacgctggtcagttttatctggcctgcgcaaaatcctgggttaatggagaaacttgccgaacgtaaggttacggtgatggcgatggactccgtgccgcgtatttcccgcgcgcagtcgctcgacgcgttaagctcaatggcgaatatcgcgggttatcgcgccattgtagaggccgcgcatgaatttgggcgcttctttaccgggcaaatcaccgccgccgggaaagtgccgccggcgaaggtgatggtgattggcgcgggcgtagccggtcttgcggctatcggcgcggcaaacagcctgggggcgattgtccgcgcgtttgacactcgtcctgaagtcaaagagcaggtccagagtatgggggctgagttcctcgaactggattttaaagaggaagccggtagcggcgatggttacgccaaagtgatgtccgaggcgtttatcaaagcggaaatggcgctctttgccgcccaggccaaagaggtcgatatcatcgttaccaccgcgttgattccgggcaaaccagcgccgaagctgattacccgcgatatggtcgattctatgaaggccggcagcgtgattgtcgacctggccgcgcagaatggcggtaactgcgaatataccgtcgccaatcaggttgtgacgacggacaatggcgtgaaagtaattggctacaccgatctaccggggcgtttgccgacgcagtcatcccaactttatggcaccaacctggttaatctgctgaagctgctgtgcaaagagaaagacggcaatattgacgtggattttgacgatgtcgtgatccgtggcgtgacggtgattcgcgacggcgacattacctggcctgcgccgccaatccaggtttccgcgcagccacaggccgcgcctaaagcagcacctgcgccaaaagagccggaaaagcccacttcaccctggcggaagtatgcgttaatggcgctggcgatcattctttttggctggctggccgatgtcgcgccaaaagagttcctcggccattttaccgtgtttgcgctcgcctgcgtggttggttattacgtggtgtggaacgtgtctcatgcgcttcatacgccattaatgtcggtgaccaacgcaatttcagggattattgttgtcggggcattattgcaaattggtcagggcggctgggtcagcttcctgagctttatcgcggtgcttatcgccagcattaatattttcggtggcttcaccgtgactcagcgtatgctgaaaatgttccggaaaaactaaggggtaacacatgtctggaggattagttacagctgcatacattgttgccgcgatcctgtttattttcagtcttgccgggctttcaaagcatgaaacgtcccgccaggggaataacttcggtattgccgggatggcgatcgcgttgctggcgaccattttcgggccggataccggcaacgtggcatggattctggtcgccatgattattggcggcgcgattggcatccgcatggcgaaaaaagttgagatgaccgagatgccggagctggtcgcgattctgcacagtttcgtgggcctggcggcggtactggttggctttaacagctatctgtaccatgacgccagtctggcgccggtgctggtgaatattcatctgaccgaagtcttcctcggtatctttattggcgcagtcactttcactggatcgatcgtagcgtttggtaaactgcgcggcaaaatctcttctaagccgttgatgttgcctaaccgtcacaaaatgaacctggcggcgctggttgtttctttcctgttgctgctggtttttgttcgtaccgaaagcgtgggtctacaggttctggcgctactgctgatgaccattatcgcgctggcgtttggttggcatctggtcgcttctatcggcggggcggacatgccggtggttgtttcaatgctgaactcctattccggttgggctgccgcggcggctggcttcatgttgagcaacgatttgctgattgtgaccggcgcgctggtcggttcgtcaggcgcgatcctgtcttacattatgtgtaaagcgatgaaccgctctttcatcagcgttattgctggtgggttcggtactgacggctcctcaacgggcgacgatcaggaagctggcgaacatcgcgaaatcacggcggaagagaccgctgagatgctgaaaaactcccactccgtcattattacgccggggtatgggatggcggtagcgcaggcgcagtatccggtggcggaaatcaccgaaaaactgcgcgcgcgcgggatcaacgtgcgtttcggcattcatccggtggcgggtcgcctgccggggcatatgaacgtgctgttggcggaggcgaaagtgccttatgacatcgtgctggagatggacgagatcaatgatgatttcgccgataccgataccgtgctggtgattggcgcgaacgatacggtgaacccggcggcgcaagacgatccccgcagcccgatcgccggtatgccggttctcgaagtgtggaaagcacagaatgtcgtggtctttaagcgttcaatgaataccggttatgctggtgtgcagaacccgctgttctttaaagagaatacgcaaatgctgtttggcgatgccaaagccagcgtggatgcgattctgaaagcgctttaatcttttaaacgtgcggcggcctcttcggaggccgtttttatacacttcatcctttacgctgcctctttgttggctgcactcagaaaccccggtcacatcgttatctatgctcccggggatttcttcccttgccgccgcgatgcatcttgaatgattttgtgtatgtattgcattttatcttttgtttaaatcgctaagcagaacggcgatactctgcccgccggtggtctgttcgagggcgattttgacaatgatggttaacggaacggagagcaacatgcccaccggacctaataaccagccccagaaaattaacgacaaaaataccactaaggttgaaagacctaaaccacgtcccatgattcgtggctcaaggatattgccgaagaccagattaatcagcagatagcctgccagcaccagcagcgcatcataaaacccgttaaataccagcacctgaataatgggtggcagggcagcgagcaccgatccaatattaggaatatagttcagcgcgaaggccagtagaccccagacaaaggcgaagcggacatccagcgcggccagcattccccatgcgaccagccccgtcacgatactgatcgctgtttttaacaccagataatgggaaacgctatcaagcgcgcgttgaattgccgccataccttctaccgggcggctcatcatctgctgcagtttttcaggcagttgtggaacctccaacagcataaataccacggtcaatagcaataaaaagatggatgacatggcattggacagttgggtgagcaggttcgttaccagagtcatggcggcgtttggatcgatatatttcgccagctcatcaaccgacacgccaatgccagctcgctgcaaccacggttcaatacgttgcaacggtatcaccaatgaggagcgatattgcggtagggtacgagccagttcatttaatgatgtccccaaataggccagtagtagtaccattaacataacaataatcacaatgagcaatgatacggcgataacgcgcggaattcggcatcgggtcatccgttgcacaacgggattgagaacgactgcaataaataacgccaaaataaagggaacaatgatatctgcggcgaagcggataccgctcagaataactaccagcattcccagcataatgacgatttttagaccattgagcgtgatgatcggttttgccatatcagtccctgttttctgatgccgacacgaataataatgtgatgtcggtcgacctgttctggttaaaatcaaacacttcaggtaaagaagtgaaaatattttgagttaattcctggcttatgatacaaatcaggcgtgttcaactaccgaggacaattatcatccgcgatgacgagaagcaacactgcggataattgtaatattatggacaatatgttcagcgcttttttctccacgcaaacgcatcttcactctacctcctttttcctgcttatcggcgagcagcactggcgtaacgcactttagtctctcacttctgcctgagctggcgcaatgcgctgtgctaactgattttattttttagtttgctgcgtgcagcagactcgaaagagtatattctcatgcaggagaagtgtcatgttttactggattttattagctctggctatcgcgactgaaattaccggcacgctctcaatgaaatgggctagtgtgggtaatggcaatgcgggttttattttaatgctggtgatgatcacgctgtcatatatatttctttcttttgcggtaaaaaagattgccctgggtgtagcgtatgccttatgggaagggatcggcattttatttattaccatttttagcgtgctgctatttgatgaagcattatcaaccatgaagattgccggcttgctgacgctggtcgccggcatcgtattgatcaaatcagggacgcgtaaacccggcaaaccggtgaaggaggcgactcgtgcaacaatttgaatggatacacggcgcctggcttgggctggcaataatgctggaaatcgcggctaacgttctgttgaaattttcggacggctttcgccgtaaatgctatggcatcttatcgcttgccgctgttctggccgccttcagcgcgctttcccaggcggtaaaagggatagacctgtcggtggcgtatgcgctatggggcggttttggtattgccgctacgctggcggcgggctgggtgctcttcggccagcgcttaaatcccaaaggctgggttggcgtgatattgctgctcgccggaatggtcatgatcaaatttgcctgagacgatcgctgccggttggttcaggcagcgattcccgcattaatcctgcgccagagctttcagcttatcgcgaaagccggtgacggatatagcgcggttatcggcgcgccagcgatctttagccgcaggggcggagctttgtacgccaataagctgccatccgctatccgtgtgcaataagagcggcgagccgctgtcgccaggtaacgtgtcgcactggtgtgagagtacggcattctgcgcccagccggtcacgacgcaatcctgatgggaatagagcgcattcagatgatcttccggataaccggactgcgtgacttttcggtctgcggctttcaacgccgcagtgagcgccgctttatcgccggtaaataaaggcactggcgtgataccggaaggtgggtagcgcaatattaccagaccaaaatcccagcttgccgcggcaggcggcacaatccagccatcgccatccgctttcaggcgtcggcccagcgacggttcaacgcggccttcaatgccgtggatttcatagcgccatactccttttcgcgccacaaaacgcagcgcaaccgccttgtctggttttcctttcggtggcgttagcaggcagtgacctgctgtcagggcgatatgcggggagataagcgttgccgtacacaaattaccgctggcggtctctagttgcccgatggcatcccacggcgattgggtaggatcggcgacgggcacccgatcatcatggttaaaaaaaagcgttttaacgtcgctggcatccgtggcgtctgtttcagcccccccggctttcgccataaccggtaaaaaacacactatgcccagtaatacagcaatggttttatgcatatcacactctggtgggtaattatgattattaacaacaaaccctcagtactactatagacgtgacggtaagaaagtgggagtaaaatcagataactacactcaggaaagatagaaatgcgtggcaataacggcgcataaaataagcacgataagaatgagctcaaagcggtagcgagacacttttttgccctcccggaaggcggcgctaaaccagaacaatttagcgccgtaaaaacgggcgcgggggcgcgccgcagcatgttacgacttacgcagccggttgagtagttggttttgacgtggttttggctggcgctttaccaccttttttctggtgctttttagccgcctgcgctttttgctcaacggttttcttatgctgttttttgtggtgctgggtggtctgggttgttttggcaggcgctgcggttttcgcaggcgttgcagtctcagccgcgaatgctgcggaagagagacccattgcagcggcaacaaccagagctaatacttttttcattttgataccctcgatttggttttcattcaaccccactgcggggccggtgaaatgactatatcgctgttatcaaaaggcttccgtgagtgattggtttcggcatgtaacgttatgtacaatcccccggtaacgcgatgtcagcccccaccataataggtagctttacgttaccggccgttatttttggtcgcagagtcggtaatatccgccatccagaataacaggcacaccgtatatgaatccgataatctgggtggtatttacgcttctggcgctggatgcaatcagagaagttatgggcgtatcaagcttgacaggtctgtggtgaacagtgagtcgtggcgtgaaaccagcccggcgatagcgcacgttgctatcgccggattatttcttttcaggcgtgaagacgatgatgtaaccgcgtcccgaccaggatggccagcaccagcattagcgcgataaaaccacctacgccgttccagccgtaactatgccagaatacgccgcctagcgtcccggcaatactggaccccagataatagctgaaaagataaagtgacgaggcctgtcccttcgcccggcgcgcacgcgggccaatccaactactggccacggagtgcgcggcgaaaaagccggcggaaaaaagcagcatcccggcaaaaatcagccaaagcgaggtaaaaagcgtcagtaaaagcccacccagcattactgcggtagagaacagcatcaccggcccccggccatagcgtgaggtcattgcgccagctttcggcgagctccatgtgccggtgagataggctacggataacagtccgaccacggcctggcttaattcccagggggagagcatcaggcgatagccaatgtagttaaacagggtgacgaacgcgcccatcagtaaaaagccttccgcaaacagcagaggtaaccctcgatcgcgccagtggagacgaaaattaataaatagcgttttaggccgtagcgacgtgggacggaaatgttgcgaggcgggtaaaatcttccagaacatcagcgcggacgccagcgcaaagcatccgatggccgccagcgcgatgcgccagttaaaaaagtcggtcatgacgccgcttaataaacgtccgctcattccgccgatggaattaccgctaatgtagagccccatagagaaagcgacaaagctgggatggatttcttcgctcaggtaggtcattcccaccgcggcgacgccgcttaacgacagaccgatcagcgcgcgcataatcagaataccatgccagctggtcatcatggttgataacaatgtgcagcaggaggctaataacaaggcggtgaccatcaccggtttacggcctatcgcatcagaaagcgggccggtaaaaagtaagccgatagccagcatggcggtagaaatagaaagtgaaacgctgctgctggcgggggagacgccaaactcctgggaaagtaccggtagtataggctgaacgcaataaaggagcgcaaaagtcgccaggcccgcggaaaaaagggccagcgtgacgcgcatgaaaggcgctgtaccgcgtttaataaattgaaccggctgagaatggcgttgttcatcgatatcgctcgccgtggcgtcatcgagaatagttgtacgactcacgttaaatccttgctttacatctccgtcaacaggagacgggtataaccgacatgtaaagcatagaaaaagcaaaatattctgtctaatatattaattgtctcaaataagacgttaaaaatatgaatatcgaattacgtcatttacgttactttgtggcggtagcagaagagctgcattttggtcgcgccgccgcgcgcctcaatatctcgcagccgccgctgagtcagcagatacaaattctggagcagcaggtcggcgcgcgattactggcgcggaccaaccgcagcgtagcgttaaccgccgccgggcgacagtttctggtggatagccgacacatcctgagtctggtaaacgacgccgccgctcgcgccgagcggttgcatcagggcgaagcgggtgaaatccgtattggctttacgtcttcagcgccttttattcgggcggtatcgcataccttttcgctgttccgccagtcctatccgggagtgcatatgcaaacgcgtgaaatgaatacgcgtgagcaaatcgcgccgctcaacgaaggcgtactggatattggcttgctgcggaatacgccgctgcccgacacacttaatcgcgaggtgattttgcatgagccgcttatggccatgatcccgcgcgaacatcggctggcgcaaaagccggtcgtcagtctgacagaactggcggaagaacctttcgtctttttcgacccacatgtcgggacgggcctctacgacgatattctcggcctgatgcggcgctataacctgtcgccgaccatcacgcaggaggttggcgaggcaatgaccattatcggtctggtggcggcggggctgggcgtctcgattctgccggcatcctttaagcgtgtacagatgagcgagatgcgctgggttcccctggcagaagaggacgccgtatctgaaatgtggctggtatggccaaagcatcatgaacagagtcatgccgtacagcggttttgccaactgctattactggctgcccgacgggattaattacgcttaaaaagggtgaaaatgtgcagttaatcacacggctaagcaaaaagttgacggcgagtattgaagtgtttcaccatagcacacagattatttcggagcgcgaaaataaagggagtgagcggtggttgctgatagtcagcctgggcatatcgatcaaattaagcagaccaatgctggcgcagtgtatcgcctgattgatcagctcggaccggtatcgcgaattgacctgtctcgtctggcgcagttggcgcctgccagtattacgaaaattgttcgcgaaatgctggaagcgcatttggttcaggaacttgaaattaaagaggcgggcagtcgtggacgtcccgccgtcgggctgatggtggaaacggaagcctggcactatttatctattcgtattagccgtggcgaaattttccttgcactgcgcgatcttagcagcaaactggtggtagaagagtgtctgccgctgccgttaaccgaagccacgccgttgcttgagcgaattattacgcacgttgatcggttttttacccgccatcagcagaaactggagcgtctgacatccattgccattacgttaccgggcattatcgataccgaaaacggcgttgtgcaccggatgccgtattacgaagatgtcaaagagatgcctttgggagattcgctggagcggcacactggcgtaccggtttacattcagcatgatattagcgcctggacgatggcagaggcgctttttggcgcttcacgcggcgcgcgcgacgttatccaggtggtgattgatcataatgtgggggcgggcgttatcaccgacggtcatttgcttcatgcgggtagtagcagtctggtagagattgggcatacccaggtcgatccttatggtaagcgctgttattgcggtaatcatggctgtctggagaccatcgccagcgtcgatagcgtgctggaacttacgcagcttcggcttaatcagtcgatgagttcaatgttgcacggccagccgttaacggtagattcactgtgtcaggcggcgatgcagggagatctattagcaaaagatattattagcggcgttggcgcgcatgtcggacgcattctggctatcatggtgaatttatttaatccgcaaaaaattcttattggttcgccgctaagtaaagcggctgatatcctttttccggccattgctgacagtatccgtcaacaggcgctgcccgcctacagcaggaatacggttgtggaaagcacgcagtttaccaaccagggcacgatggccggggcggcgttggtaaaagacgcgatgtataacggctctttgttgattcgtctattacagggttaacattttttaactgttgtacaaaaatttgcgctaactcaagctgattgcccttgccatatcttagactttctccactgtattattttcctggcttatattttcgaagcataacggtggagttagtgatgctgaagcgtttctttattacaggtacagacacttctgttgggaagacggtggtttcccgcgcattactacaagcgttagcgtcgagtggtaagagcgttgcagggtataaacctgtcgctaaagggagcaaagagactgcagaagggatgcgcaacaaagatgcgctggtattgcaaagcgtctcttcgctggagttgccgtatgaggcgattaatccgatcgcgttaagcgaagaagaaagcagcgtcgcgcatagctgtcctataaattacaccttgctgtccaacggtctggcgagcctgagcgataaagtggaccacgtggttgtggagggtactggcggctggcgtagtttgatgaatgatttacgtccattgtctgaatgggtggtacaggaacagttaccggtattgatggtggtagggattcaggaggggtgcattaatcatgcgctactgactgcgcaagctgtcgctaatgatggactgcccttaattggctgggtggcgaatcgtatcaatcctggcctggcgcattatgctgaaattattgatgtgcttgggaaaaaactgccagcgccgctgattggcgagctaccgtacctgccgcgcgccgagcagcgtgagctggggcagtatattcgtttgtcaatgctcggcagcgtgctggcggtagatagaatcatggcgtaacgttcgcgagagcactgacgcgactacacaggcaatcagcagaccggggagtaactgatactcgccggtcatttcacaaatcatcagggtggacattatcggcgcatgggttgtcgccgccagtagcgtcgccatacccgccagccccaataaaatcgctatttcatccgagcctggcagccagaatccccatatccgacccagaaacattccaatggataatccgacaaataatgttggcgtaaagacgccgcccggcgcgccagacccgctgctggcgagcaccgccaggattttgcacacaaaaattccgccaatcagcgagaatagcggcggggagagcaaaaatgattgtacgacgctatagccgtttccccataccgtgggcgtgagtaacgacagtaatccgacaataagcccgcccaacgccagttgccagggcggggacagttttaaacgtaagaaactattatggctggccgtcatcagccacatcagcaatgggccgcacagaccggcgaccaggccggtactgactatcatgacgtactcccgcgcgtggagatcaacggtcagatgtacggtatagagtagtgaatcgctaccgtttaatacatgggtggttagcagggcgacgacggcggaaacgacaaccgggccgagggaagccagcattaaggtaccgaacaggatctccgcgataaacagactgcccgccagcggcgcatggtaagcgcccgccatgcccgcagcggcgccgctggcgatccataatttccattcctcacgcggcgtgaagcgtcgggcaaagctggacgccgccagcgcggcgaggaggatcattgcgccttcgcgaccaattgcgctgccgctgaccacgaccagcagcgaggccagcgatttcaccagactggcgccaacgtcaaattgcccgtcggtttgcaatgcttccatatagtcagtgggcgcatgggggcgctgttggttcattttttgccacccccacagcaacagaccagcggccaggccgccaagcgccggcgtaatcagccgtcgccagggcgaaagcccctcagccgcattcaccagactgccggtgtcattactcaggaaaatccactccagcaattgcatcgcatgacggaaggcggcgacagccagcgccgcgagaataccgatgagcgtagcgatcagcaggcgacgaaacatcgcgcgcagatccgggtaagcgtgtaaacgatgcatgagcgggtaaacagggagtttcaggatagcctattctgcggggaaatggcgtcagacgcaaaagcactatgtgcgatataatattgcgtacaataatgatactgccggatagcgagaggctatccggcggcaacgttagctgttttcgtgaatatttagcgcccgacgcgtgcggcctgagctgagatagtcggcgatgtaatcctgagagatttcaccgttatagcgtccgtcttcatcaacgatcggcatccagctggtattactttcgtacaatctggacagcacaatacgcaggttatcttccgctttgcccgtaatacggaaaggatgggtgatatcggcgcagattccgctggcgttccgcgcttcccggcgcttcacaaatcccagtggcttaccgtcgttgtcaatgacggtaatggcgcgaatatcgtgatcatccataatgccgaacgcctcgcttaacggcgtggaaggccgcgcggtaatggttggctgttggtcggtcacatcgcctgcggagaccagtagcaaacgctttaacgttctgtcctgaccgacaaacgacccgacaaactcgttagccggtttggccagcagttcatcaggactggcgcactgtacaattcgcccctgacggaacacggcgatacggtcgccgagctttagcgcttcgtcgatatcatggctgaccagcatcacggtcttttttagcttacgctgcatatccagaaactggttctggatcacttcgcggttaatggggtccaccgcgccgaagggctcatccatcagcagtaccggcggatcggcggccagagcgcggatcacgccaatacgctgttgctgtcccccggacatctcctttggatagcgatgcagaaattttctggcatccagcgccaccatgtccatcaactcttcggcgcgttgcttgcagcgtgctttgtcccaacccaacatgcgcggcacaacggtaatattttcttcaatcgtcatattaggaaacaggccgatttgttggataacatacccaatattgcggcgtagcgttaccgcatccatatcgttggtattctcgccgttgataagaatattaccgctgctgggcgcgatcagccggttgatcatctttaacgtggtggttttgccgcagccggagggaccgagtaagacgcacatttcgccttccggcacgttcaggttgacgttgtcgacggcttttagcggctgaccctttttctgtacaaattgtttggtgagattttccagttttatcattatcgtatccccttcggtgtcagtacgacttgcagacgatgcaacagccagtcaagtacaattgccagtagacagatcatcagcgcgccggcaattaacatgcgaatatcactgccgctaatgccgtttaacagtagcagccccagaccgccggcgccgatcaccgcggcaatcgccatcacgccgatattcatcactaccgcggtgcggatacccccgaaaataaccggtagggccattgggatttcgacccagcgcagccgttgccagaaagtcataccgatgccgcgtcccgcttcacgcagaccgggcggcaaactatcaagcgcagtatgggtattacggacaatcggcagtaaagagtagagaaaaacggccgtcacggcgggcagaacgccaataccatgtccgatcagcgaaaagagcgggatcattaatccaaacagcgcgatagacggaatggtaagaagtagcgtggcggcgcccaataccggcgttgccagccatttgtggcgtacaatcaaaacgcctaacggtacgccgatgataatcgccagaccgacggccagcgcgaccagccagagatgctgaaaggtaaggctggcgagatagcctgcgttatccagcatataatgtatcgtatccatagtcgctccttacagcagacctttgtcctgcaaaaattgatgggctacctgttgcggcgtgcgatgctcgatatcgacctgagcgtttagggtcgatatcacatcgttattgagcaggccggaaagggtgtttaaggcgtcatcaaggccaggattggcttccagcacctctttacgcaccacgggcgtgacagcgtaacttggaaagaagcctttatcatcttccagcactttcagatcaaaccctttcacccgtccgtcggtggtatagaccagcccggcgtcaaccagcccatcccgaacggcgttatagaccagccctgggtccatctgtcgtatttgcgggcgatcgagctgcatctggtaggcttgctgaaggggcttcattccgtcgctgcgcccggcaaattccagatcgaggccgagcatccagttgtggtcaggatcgttctgccggacctgttcgatttttgccaccatttgcgagatggtggtgatattttccgactcggcgcgtttgcgctgcatcgcgaacgcgtaagtattgttcatgtcagccggtttgagccataccaggcccagcttcgcatccaggcgttttaccgtgtcgtaggtttcctgtggactcatgcgcttatcgatacggttgaaaataatcagcgatgtaccggtgtattcccaggtaatatcaatttgtttattcaccatcgcattacgtgaaatcaccgcggcgatattggtttgcggctgaacctgaaagcctttcttctgcaaatactgaacggtcatagcggaaagaatatgctgttcggtaaagcttttggtggcgagaaccagcggcgcggcctgcgtctggctactgaacaacagcgttgcggcaagccatcccaacaggtgttttttgaatctcatttaacgctccttattgttatttatgcgttcagacggtatgagggctaaggcgtcgcccaaaccaggcaagcagagtgtcaagaatcagcgcgaataacgccgtggccgttgcgccgaggatcaacgtcggaaaatcgttgagataaattcccgggaaaatcagctcgccgtagctgctggcgccgatcagaaaggccagcggcgcggtgccgacattgatggcggtcgcgatgcgaataccggacagcatcactggccacgcattaggtagctctacctggcgaagccgctgccattttgtcatcccaatcccgttcgccgcttcaatcagtgaggcgggaacggaacagaggcccgcataggtattgcggacgataggcagaagggaggccagaaatagcgcgacaatggcgggcgtatcgccgatcccgataatcaccatcgctaaggccagaacggccagcggcggcaaggtattaccaacattaaagatttgcatgacatattcagcaaatccttttgccgcaggtcggctgagtaaaatcccgctcgggataccgaccagtaaagcaaaaaacatggacgtaaagaccagcatcaaatgccgttgtccgagatacagcagatcgacctgacgcgctttcagcgtctccagaccgattccccagataaacagcgccagtaacagcaaaatgacgatagtgaacccaagtacacgttttagggtgagggtgtgcattgcggtgtgtctccctgtttgcatgtgttatggcgacgttaagagtcgcgtgttgttatgccatgttccggcagggtgctttgagctatagcaacaggttgggaaggattccagcgaagcgtgatgtttaacactattaaacatctattaacaattatgctttgcccttatgcggcttagggtgaacattcacgataaagaattatcttaaaaatagaagcgcggtgtgacgttgtcactttttgtagataaaaataggccgcaatgagagaaaaggcaggtaaaatcctgccttttgtggggattaacggaataacggttttacagcgacgggaataatgagttgagcttgccattgcgccagcgtcagacgcgccagttgccccaacgcctgataaaacggatgcccggcatgatcgataaatacgtccagaaagcgggacgaccacggaaacagatgccaggccaggagttgttcgcattcatgatgacggtcgttctcggcaagccaggccgccagtagcaacagcgacccaaaatgatcttctggctcgttttgctgcatttcaaactgaattccgttttcgcgcatccactgacgtagcgccaatgtagaatcgccaaataatacgctctcacgatccagccagacggaaccccacggcggagacggcagagcgtaagggccgataaacagacgctgccaggcctgtggcaacgactcttcgctgtgggtcttaaacatagccgccacaggcgcaagcgcctcggcatcaagcggccactgcgcctgccagtcgtcgtttaatagcgcctggaccagaggagcggtttcgtggctttccggcgaataataaaacaacgcgccaagaacacgcgccgttactgcaaaatcatcacgttgtaaaaaagtggtcattcaaacaatcccgaaaggtgcgggtcgccccgcacgcataaattaacctgcgacggccatacctacggtcatatgcaggccataaaaaagtccgcggccaataatttcgcctgccagcaccagcacgacaccgagcagcaaaccaacggtatgcggttcgcggcgacggattagcggacatagccagcagcctaatccggcagcaagcaagacaatgcgccagacctgtagcataccgtaatccggtgcgagatggctggcctgttgcacggaactgtgaatggttgagagagacagtccttgtagtacgatgaccgtcacgcacaccaccaatgccaggccgctaatactggcaaacgtcacgctgcaaaatgggacgcgcgcgatgcgtagcagtaacgccgcaaacaccgggccgcacaggaatgccgtgaggaaaaaggccagcgtggtgtagccattataccaggttggcacggtatctatctgataaacgagcgtcattgcccagatgaatgcaacgccgagcgccatactgaccagcagccacactttacccagcgccgggggcattttaccgagtaccgccaccagccaccagatgccgcctacggcaaagaacaccgatcctgcggcgatttcattactcagtgcggaagcgcctacgcggttaagcgagttaaacgcgcgcatcggcgagccgagatgcataatcgacgcgaggaatcccagtcccatcaccagccacagaaaaaacatgctgcgcacgatgcgctgacgggcgatggtatcgtcttttgccgtcagccagcccagtccgctaacgattaacgcgccgaccacgcactgaccaaagaccgtgaagatcatcaacggccattcatgccatccacttcccatcttatacctccttcggattggccagataaccggtagtgtccccggtcgggcggctgttggcgttgggtttaatcacaatattcggcttcgtgaaatgcgcgcgcggcaacggcgcgacggcagccagctcaccgtgttttttacgcagttcgtctatcgggccaaagtccagtgcccgcagcgggcaggactccacgcaaatcggtttcttgccgtcagcgacacggtcataacagccgtcgcacttggtcatatgacctttggccgcgttgtactgcggcgcgccgtacgggcaggccatgtggcagtagcggcagccgatacagacctcttcgttcaccaccacaaaaccgtcatcgcgcttgtgcatcgcgccgctcgggcagactttggtacaggccgggtcttcgcagtggttgcatgaaatggagagataataggcaaagacgttctggtgccagacgccgttatcttcctgccagtcaccgcccgcatactcataaatgcggcggaagctgacgtcgggagtgagatctttgtagtccttgcaggccagttcgcaggttttgcaaccggtgcaacgactggaatcaataaaaaatccatactgggttgtcatcggttactccttacgccttttcaacctgaacaagattactgtgtgacggattacctttcgccagtggggaaggccggtgcgacgtcagaatgttaatggagccgccgcgatcgactttgtcgccaaacatgtcggcatttaaccaggcgccctggccgatagcggtgacgccgggcaatatgcgcggcgtgacttttgccggaatgagcatctctccattctggttaaagacccgcacggtgtcgccatgctgaatgccgcgcgcttgcgcatcaatcgggttgatccagatctcctgcggacacgcctgttgcaggatgtcgatattgccgtagctggagtgggtacgcgctttatagtggaagccggttagctgtagcgggtagcgctgacgaagcggatcgtcccaaccgtcaaagcctggcgtataggcgggtaaaggatggataatctcatctttcttcagctcccacgtgttggcgagggttgccagacgctcggaatagatttcgattttaccggacggcgttttcagtgggttggcggcagggtcttcgcggaaggcgcggaaagcgacgtagtgctcctccgggcattttttcttgaaaatccctgtctgtttcatctcttcgtaatccggcatttccgggttacgcgctttggtttttgcgtgcaggtatttgacccactcatgctgcgtgcggccttctgtgaaggtctggtatacgtccggaccaagccgtttagccacttcactgagcgtccagtaaatgggctttctttcaaatttcggcgaggtggcgggctgaccaagaatgacatagcccatattgcctgcggattcgtgggaaatcagatcttcctgctcggtcggcattaaatcaggcagcagaatgtcgcaatattttgccgacgcggtcataaagtgctcgatgccgacgatcatttcacatttactgtcgtcctgaagcacctcgtgggtgtgggcgatgtcgccatgctgattgatcagcgtattactggcgtagcaccacaaaaatttgatcggcacgtcgagcttgtcttttccccgcacgccgtcgcgtgtggcggtcatttccgcgccatgatcgatagcgtcggtccaggtaaagaccgaaatctgggtttttaccgggttctccagcatagaaaaccattcgacgcccagatcccaggtgccttcgcgcacgccggaattaccgccatttatgccgacgttaccggtgagtacagacagcatggcgattgcgcgtgcggtctgctccccgttagagtggcgttgcggtccccagccctggcaaatgtaagccggtttcgccgagccgatttcccgcgccagttgaatgattttttccgccggaatactggtaatctgcgcggcccattgcggcgttttagcaataccgtcgtcgccctgacccaaaatataggctttatagtgcgcgttacgcggggccgaggcgggcagagtggtttcgtcgtagccgatgcagtatttatccagaaacggtttatcaataagatcttcggtaatcagcacccaggcgattgccgccgccagcgcgccatcggtacctgggcgaatcggcagccactcgtcttctcggccagcggcagtgtcgttataacgcgggtcaatgacgatcatccgggcgttggagcgctcgcgcgcctgttcgacatagtatgtcacgccgccgccgctcatacgtgtttccgcgggattattgccaaacatcaccaccagttttgtattggcgatatcatccggactgttgccgtcattgccgccgaacatatagctcatggccgcgctgatttgggcggtgctgtagctaccgtaacggctgagatagccgccgcaggcgttcatcaggcgatacggtacgttagaattggtaatattgccgccgtccacgccggtaccgtaaagcacatgtaccgcttcgttgccgtagtccttgaggatacgtttcaggttatcgccgatggtatccaacgcttcatcccaactgatacgttcgaatttgccttctcctcgtttaccaacgcgtttcatcggatatttcaggcgatcgggatgattcatccggcgacgaatagaacggccgcgcaggcaggcgcgtacctgatggttgccatattcatcgttgcccgtggtatctgattcaacccaatatacggtgtcatcttttacgtgcaggcgcagcaggcagcggctgccgcagttaacggtacatgaactccagaccgctttttctgccacattgccggatgcgaggtctgctgcggcgtgtgcgatgcgggagaacggaagggtgaaagcgctactggcaagcgcaaggctaccgatagcggaggttttcaccaggcttcgtcggctgagactggccgccattaatgcctcagggttggtgattttcataacagctcactatgctcatccaaaaaagagttttaaatgtcgttgtgttcgcaaaacggggagctccgggcgcgtaaaaacgtcccggagcaggcggcttagattttttcgatttccaccagatttgtatgttgaggattcccttttgccaggggggaaggacgcagcgtcgtgagcgtattgatgcaggcgccgtggtcaattttatcgccagccatatccgcattatgccatgcgccctgacccatcgcgctgacgcccggcagaatacgcggcgtgactttggcgggtagacgcacctctccacgatcgttaaagacgcgaaccttatcgccattcgcgataccgcgtttttgcgcatcgagcggatttatccacacctcctggcgacaggcggcctgcagaacatcaatattgccgtagcttgaatgggtacgggatttatagtgaaagccaaacagctgtagcgggaaggtgctccgcttcggatcgtcccatccttcaaaagtaggggtataaatcggcagtgggcttatcacgtcgccttccgccagctcccaggtactggcgatgtgagcgagtttgcttgagtagatttcgattttaccggacggcgtttttaacggattggcctgcggatcttcacgaaattttttataggcgacaaagtggccgttgggatctttgcgtttatagatgcccatttttttcagatcgtcatacgcgggcaatgccggatctcttgcctgcattttggcgtacagatattgcagccattgcgcctgtgtacggccttcggtaaaccgctgatacacatcgtcgccgaggcgtctggcgatttcgctgagtacccagtagatgggcttgcgctcgaacttaggcgtcgtcgccggttggataaaaatcagatatcccatattgccggcgtaatcattggggatgatatcctcctgttcgacggtcatgagatccggcagtaaaatatcagcgtacttcgcggaagaggtcataaagttgtcgatgaccacaatcatttcgcatttcgcttcatcctgaagaatttcatgggttttattaatatccgaatgctgattaatcagggtgttgccagcgtagttccatagaaatttgatcgggacatccagcttatctttgccgcgtacgccgtcgcgcagggcggtcatttccgggccgcgcgcaatggcgtccgtccagctaaagcaggagatggcggttttaacgggattctccaggaccggcagacgttcaatggtaatggtgtaagtggattcgcgtgcgccgctattaccgccatgaatgccgacgttgccggtcagaatcggtaacatggcgatggcgcgagcggtttgttcgccgttcgcctgacgctgcgggccccaaccctgacagatgtaggccggcttgacgctgcctatctcgcgcgccagtttgataatccgatcggcggggatgccggtaatatgcgatgcccactgcggcgttttggcgataccgtcctcgccctgacccaaaatataagccttataatggccattggggggcgcgtcagccggaagggtcttttcatcgtagccgatgcaatagttatcgagaaaaggctggtcaacgagattttcgttaatcaatacccaggcaattcccgccaccagcgcggcatcggtgccggggcgaatcggtatccactcgtcttcacgtccggcagcggtatcggtatagcgcggatctattacgatcatgcgcgcatttgagcgttcacgcgcttgctccagaaaccaggtaatgccgccgccgctcatgcgtgtttcagccggattattgccgaacatgaccaccagtttactgttttcgatatcagatgtgctgttgccgtcgttggaaccataggtgtagggcatggcgcaagaaatttgcgcggtactgtatgagccgtattgattcaacgaaccgccgtagcagttcatcaaacgcttcaccggcgaggcggcaggcgacgagcgggttatgttgccgcctacgatgccggatgaatagtggatataaacggcttcattgccgtaggtctctacggtctttttcaggctggcgctaatggtgtccagtgcttcctgccagctaatgcgttcaaatttgccttcgccgcggcggccaacgcgtttcatgggatagttaaggcgatccggatggttaatacgccgacggattgaacggccccgcaggcaggcgcgaacctgatgattgccgtagacatcgtcgccagtgttatcagtttcaacccaccagacttcattatcttttacatgcagacgcagggcgcagcgactgccgcagttgaccgaacaggcgccccagacgattttatcttcttcgttgcgcatagcctgctgcaccgccgcggccgcggtacgcatcccaaacggtaaagatacgcctccggcagccagcgccagtgagccaagcgccgctgatttcactaacgtcctgcggctaacgcctgtttgttgcttttctccgggcatcactcactccattgtcgttattatttcgctatatattgataactataacgaaattattaacatgctaatgatgtaatgagtttacccctttgggagtaaggattattaatccatgtcaaagagcgttaccctccggacccggagggcaggaggaggttattgcggttcggcggatgaaccgtcctgagcgggagaggtattggctggcgcattgccgctgctggtgcgggtataaagaattttatgcgtgtcgttcgcgcaatggcccaccacctgtgagtccggctgatcggcctggtcgttaggaacgatagtgagcgtaaaattatccgccggcacgccgttattgatgatacgttgttcaatatcgctttttactctctcgcacgatcccggtgccgccatcaccagcgagggggcgctaactaacgccagagcggctattgcagttgcgattttcatcatgaactcctgtgattaatgacgatgttctaagcttagcatttttcgtgtaaataactgtatttgctaatatgatgataaatatcttttcatcctggtgatacgtgtgaagaaaccccttttactgacgttattgtgcatgatactggcaggttgtgataacccgaaatcccttgagtcttttacgccggaaatggccagtttttcgaacgaatttgattttgatccattacgtggtccggtaaaggatttcagccagacattgatgagtgagaatggcgaagtggcgaagcaggtcaccggtacgctttcacaggaaggctgttttgatacgcttgagttacacgatctggagaataatacggggctggcactcgtgctggatgccaattattaccgggatgctcagacgctggaaaaaaaggtgcagttacaggggaagtgccagctggcggcgttgccttcggcgggcgtgacctgggaaacggacgacaacggttttgtggtatcggcgacgggcaaagagatgaaggtcgagtaccgctatgatagcgaaggctatccgttaggtaagacaaccataaactcgcagaatacgctctctgtgacggcaaaaccctccgcggacccgcgtaaaaagctggattatacggcagtcagccgggtggatgatcgacaggtcggcaacgtcacacagagctgcgaatatgatgcgtacgcgaaccctgttgactgccggcttgttatcgtcgatgagagcgttaagccggcagtgtcccaccattacaccattaaaaatcgtatcgattactactaaaccgggcgcggtgcgactctccgtgactaccgcgccgcgcttactgcgcggtgggtttcaggagtgtagaaccggacgttttatgttcatccagatactgctgctggaagatacacatgcggatggtgttacggtattcgccgttaatgaagaactcatgaatcagctcgccttctactctaaacccgagtttacggtagatgtgaatcgctttttcattctctttatcgacgatcaaatacaatttatagagattgagtacggtaaatccgtaatccatcgccagtttggccgcgcgtgacgccaggccttttccctggtactccggcgagataataatctgaaattccgcccgccgatgcacatggttaatttccaccagttctaccagcccggcgttttcaccgtcgcattcgacgacaaagcgccgttcgctttggtcgtggatgtgtttgtcgtagagatccgacagttcgacaaaagcctcatacggctcttcaaaccagtaacgcataacgctggcattattatcaagctggtggacaaatcgtaaatcttcacgctcaagcgggcgcagtctgaccttgtagtcacttgtcatactgtatccttacacttccttttagttatcctgcatcagggcgtaataacgcgacctgtacgacgatccagacaccgcagcgtattgggctcccaataggcgttgatgttggcgctttgctcgcatttatcgcggttatcaaaggcggcatcggctttgtcccactctttttctgcgcgggtattcactttctgacgcagactgcgagtgtcgttccattgttccttttccatcgccgcttcctgacgactttgtgcgctatctcccgattcaatcaccagtttactggtttcagcgaatgcggaagtagtatatacaacggccgccaacgtaagcattgccgtcaggcacaggcgtttgctcagcgtattgttcatcacaacatcctttcattagaggggaaaaagcggtaaaccacctgtaaattctacaccaatccttatgcctggcatatacacaagaatggccggataaccgtaacgatattctgttgtattatcacttatcatttcgtaaccaaatgaatctcatgctaaagacgactctgcttttctttgtcaccgccctctgtgaaatcattggatgttttcttccctggctatggcttaagcgcggcgccagcgtgtggtggcttctgcccgccgctgcgtcacttgcgttattcgtctggcttttgaccttgcatccggcggcgagtgggcgggtttatgcggcttacggtggggtatatgtctgtactgcgctcctgtggttacgtgttgtcgatggcgtccggctcacggtttatgactggtgcggcgcgctgatcgcgctgtgtggaatgctgattatcgtcgtcggatggggacgtacgtaacattgccgcgcgaccagaacattttgtgatctggcagcgctttttacatcaatatacttgtatggtagtagctcagttgggtaaatttcctgcatcccataatgcgatgtaaggaataaaaatgaagattgtaggggctgaagtttttgttacgtgtccagggcgtaacttcgtcaccttaaagataaccacggaagacgggatcaccggtctgggggatgccaccctgaacggacgcgagctcccggtggcctcgtaccttaccgatcacctgtgcccacagctcatcgggcgggatgctcgccgcatcgaagatatttggcagttcttctacaaaggcgcgtactggcgccgtggccctgtcaccatgtccgccatttccgcggttgatatggcgctatgggatattaaagccaaagccgccaatatgccgttgtatcagttactcggcggcgcttcgcgtgaaggcgtcatggtgtattgccataccacaggccacaccatcgacgatgtgctggaagactacgcgcgtcataaagagcaagggttcaaagcaatccgcgtgcagtgcggcgttccggggatgaaaaccacctacggcatggcgaaaggcaaggggctggcctatgagcccgcgacaaaaggccagtggccggaagaacaattgtggtcaacggaaaagtatctcgattttacgccaaagctgtttgacgccgtgcgtaatacgttcgggtttaatgaacatcttctgcacgatatgcatcaccgactgacgcctattgaggctgcccgctttggcaaatgtattgaagactatcgtttgttctggatggaagacccgacgccggctgaaaatcaggcgtgcttccgcctcatccgccagcatacggtcacgccgattgccgtaggcgaagtctttaacagtatctgggattgcaaacagctcattgaagagcaattgattgactatatccgcaccacgcttacccatgccggtggtattaccgggatgcgccgcattgctgattttgcctcgctctaccaggtgcgtaccggttcgcatgggccgtccgatctgtcgccggtttgtatggccgctgcattacatttcgacctgtgggtgcctaactttggtgtgcaggagtttatgggctactccgaacagatgctggaggttttcccgcataactggacgttcgagggcggctatatgcatccgggcgacaagccaggactgggcattgagttcgatgaaaaactggcggcgaaatatccttacgatccagcctatttgccggtggctcgcctggaagacggcacactgtggaactggtaaggagcgaaaaatgaaaagcatcgtaatcgaaaaaccgaatacattaactatcgaaacgcgcgcgcttccgcagcctgcgccgggcgaagttcgtattaaagtgaaactggcgggtatctgcggttccgacagtcatatttatcggggacataatccctttgcaaaatatccccgtgtcataggccatgaatttttcggtgtcatcgacgcggtaggcgacaacgtcaatcacgaccggataggagaacgggtatccgtcgatccggtgatcagttgcgggcattgttacccttgttcagtcggtaaacccaatgtgtgtacctcgctggtggtgctgggcgtgcatcgtgacggcggtttcagcgagtatgcggtggcgccggcccgtaatgctcatcgcataccggacaacatcgcagatcatcatgccgtcatggttgagccgtttaccattgcggcaaatgtgacgggacaagtgaatccgaccgagcaggacgtggcgcttatctatggcgcaggcccgatgggactgacgaccgtacaggcgctgaagggggtttatcaggttaaaacggtcatagtcgttgatcgcattgaagagcgtttagcgatggcgaagcagagcggcgctgactggaccctcaataatggtcaacattcactggcggaatttctacagcagaaggcgctaaagccgaccttgattgtcgatgccgcctgtcatcccgctatcctgcaagaggcgattacccttgcatcgcctgcggcacgcattgtcctgatgggattttccagcgacccgtgtgagattgtacagcagggtattaccggaaaagagctggctatttattcatcgcgtcttaatgccaataaattcccggtcgtgattgactggctgaataaagggcttattgatccggataagctgataacgcatacatttgattatcaacatgtcaccgacgcgattgagcttttcgagaaagaccagcgtcaatgctgcaaagtcttactcacgtttgcgaaataatataaatacttgcgagtaagtggtacgcatcttacctcttagagattgcctatatgacacaaataaagcatgaacgatcgactcaggatttagtgcgcgctgccgtatctggctggttaggcaccgcgcttgaatttatggattttcagttatattcactaggcgcggctctggtcttccatgagatatttttcccggaacagtctgccgcgatggcgcttattctggcaatgggcacctatggtgcaggttatatagccagaattatcggcgcctttgtttttggtaaaatgggcgaccgcatcggacgaaaaaaagtattgtttattaccatcaccatgatggggatctgcaccacgctgattggcgtactgccgacgtatgcgcaaatcggcatttttgcgccagtattactggtaacattgcgaattatacaggggctgggcgccggggcggaaatttccggcgcgggtaccatgctggccgagtatgcgccgaaaggaaagcgtggcatcatttcctcgctggtcgcgatgggcaccaattgcggtacgttgagcgcgacggcgatctgggcggtgatgttctttgcgcttgaacgcgaacaactgatcgcctggggatggcgtattcctttcctggcgagcgtcgttgttatgatattcgcgatctggctgcgaatgaatctgaaagaaagtccggtattcgaaaaagtaagcgaaggtgaaaaatcgccagcgttaacgcctgcgtcagaaaatacattgggcgcgatgtttaccagcaaatctttctggctggccaccggtttacgttttggacaagcggggaattcagggcttattcaaaccttccttgccggatatttggttcagacgttattatttaacaaatctatcccaaccgatgcgttaatgataagttccgtaattggttttatcactatcccactcttggggtggttgtccgataaatacggtcgtcggctgccgtatataatattgaatatctccgcgattattctcgcctgaccgatgctgtctattgtggtagataaaacgtatagccctggcgtaattatggcggcgctcattgttattcataactttgccgtgctgggattatttgcgctggaaaacatcaccatggcggaaattttcggatcgcgtaatcgcttcacccggatggcgatttcaaaagaggcaggggggctggtggcggtcggttttggccccgtcctcgcagggatcttttgtaacatgaccgattcctggctgcccatcttaattatgctggtgctctactcgtgtattggtctgatttctgcgctgttgatgccggaggtcagagatcgcgacctgagtctgcctgaggatgcggcggaagcgacagcggcagagaagttacgccactccgcaacccagacgagttaaatcgtgtcgacggtatggccggaacgctaatgcggtttcggccatgctgtccggtcacttttgtttaattagcgtaaatccaaatgcaccagggcaggcgttactctgcgactgttccgctttcagaatatagaggttataaaatgcaaaacaggcttttatcggcaaaggcgacgcttcctgattacgatcgcgcggcgctggcggcgcggatggtccatctcggttttggcgcgtttcatcgcgcgcatcagggggtttacacagatattctggctgcggagcagcatagcgactggggctattatgaggttaatcttattggcggcgaacagcagattgccgatctaaagcagcaggataacctctataccgtggcggagatgtcggcggaagcctggacggcgcgtgtggtgggcgtcgtcaaagcggcgttgcatgtccaggttgatggtctggaacgtgtgctggcggcgatgtgcgaaccgcaaatagcgattgtgtctctgaccattaccgagaaagggtattgtcattcgccagccacgggccaacttctgctggaacatcccatgattgccgccgacctgcaaaatccgcatcaaccgctaacggcaccgggtattattgtcgaagcgttagcgcgtcgtaaagccgcaggcttaccggcatttaccgtgatgtcctgcgataacatgccggaaaatgggcatgtgacgcgtcaggttgtgacggcttacgcccgggaggtggatgcggaactggcgatatggatcgagcaaaacgtgacatttccgtcaacgatggttgatcggattgtccctgcggtcacgccggagacgctggataaaatcgaacaactgaccggcgtgcgcgatccggcgggcgttgcctgtgaaccgtttcgtcagtgggtgatagaggatacgtttgtggcgggtcgtccgctgtgggaaaacgcgggcgcgacgttggtcgccgacgtggttccgtttgaagagatgaaactgcgaatgcttaacggcagtcattcattcctggcttatctggggtatcttgccggctatcagcatattaatgactgcatggctgacgacaactatcgtctgaccgcgcaggcgttaatgttacgcgagcaggcgcccacgctgaaagtccagggggtagatttacagcgttatgccgatcagttgattgcgcgttaccgtaatccggcgctgcgtcatcgtacctggcagattgcgatggatggcagccagaaacttccgcagcgtatgctggactccgttcgctggcatcttgctaatcatagcgattttgatttgctggcgctgggcgtggcggggtggatgcgttacgttggcggcgtggatgagcagggtaaggcgatcgacgtcagcgatccgctattgccggttattcagcgcgccgtggcaaacagtgaagaaggcgccagtcgtgttaaggcgctgctgggaatggctgaaattttcggcaacgatttgccgcaggcggcgcggtttacgcaaaaagtgcaagaagcctatgacagtttactgacatatggcgcgaaagcgagtgtggcgaaatatgccgagcggttgaaatagcgtaacagagacccggtagcattatgctaccgggaaggccggagcggttcttagcggccagtggtatcagttcatgccaagacgaatcagttcgaccggcgcgaatttaccttcacaaccttcgacaatcaccgttttgccgcggcgaatttgacctgcatccagaccttcgctctcaatggctttgataatcccggtatgacccgtgccgcttatcatgacccggctaccggtagtgattgcgttacggttacgatcgtatgtcatcatggtgttttctcctttcaaacttacagccaaagcccgcaggtttccccgcatgacgggcgacatataaatacgcttatcgttgcgaattttttttgtttttgatcaagctcacggctttttaggcgggaatgtgcagggtgagaaagcggagaaggcgtctcaccccgacgttaaagggggttactcttcgctaaaccagccgctgttttcctgacggataagctgaacggattcgctaatttcctgcaaatgctgggtcattgcgctctcaaccgcattgccgtcacgattttccagcgcggagaaaatatcatggtgctggcgcaacaacatctccggcggagaaacatgatccagactcatatagcgaacccggtcgattgtcgctttgatattttcaatggtatcccacgctaactggcaatcggcgatctgcgccagcttttggtggaaatcgtcatcaagctggaaaaaatcatcaatctgtttgcgctcgatagcaatatgttgcaggtgcaggttttgcgccagttgatagcactggttgtcggtgatcatcgccgccgcacggcggaccaccgcgcattcgatcgcctgccgaacaaagcagccattctgtacctgagaaagcgaaatcttattcacataactaccgcgctgagggcggatctgaatcaacccattttccgccagctttataaaagcctcgcgcaccggttgacgcgaaacgttaaaacgggttgagacctctttttctgatagcggcgtgccaggcgggataagacaatgcacgatatcacgccgaagaatacggtaaatttgctggttgacaggctgtgtagggttaagctgcgtttcgacggtcattcattcttactttttaggcggttgacccggatactctaccacttttccgtggtggtctataccgatcatgtttctggttgcagatacgtttgccagggattacccggcccgcagaccgggtataaccccttagctacggtggacgctgagccctgcgaaggattgggtaacaggcatcatttcaacggtattaatattcacatgcgcggggagcgtggccacccaccataccgcttcggtaatgtcttctggcgtgagcgcggtggtattttcgtaagttttacccgctttctcatcgtcgcctttgaaacggacgctggaaaactcggtaccgccaaccagacccggttcaatgtcggtcacgcgaaccgccgtgccgtgtaaatccgtgcgcaaattcaggctaaactggcgcacaaaggctttcgtcgcgccatagacgttgccaccagcataaggccaactgccggcggttgaaccgatgttaatgatatgaccgcgattacgttcgaccattcctggcagcacggcgcgggtcatataaattaagcctttattattagtatcgatcatagtttcccagtcttctacgctggctttatgcgccggttcaagacccagcgccagaccggcgttattgaccagcacatcaatatcgcgccactgcgcaggcagagaggccatcatctcttcgatggccgcgcggttgcgcacgtccagttgggcggtcaatacgttctcgccaagctcatcttttaacgcttgcaggcgttcatgacgacgtcccgtggcaatgactttatgtccattctcaacaaaacggcgtgcaatgcactcgccaaaccctgcggttgctccagttactaaaacgatcatcacacagttcctcaacgctttttgtgttgtattaccatagcacgcggcgtttatgaaagggtaatcctggttaacacggttgcggtcagcatagggggaagcttactcttatgatcaacctattttcaggagtgaaaaatgtcgacgaatcctttgttagaccagagtatgttgccttatcaggcaccgcgttttgatcggatcaaagattgccattatcgtcctgcttttgatgagggcgtgcggcaaaaacgcgtggaaatcgaggccatcgtcaatcatccggcggcccctgactttacgaatacgcttctggcgctggagcaaagtggggcgcttctgtcacgcgtcaccagcgtttttttcgcgatgacggccgcgcacactaacgatgaactccagcggttggatgaggccttttctgccgagctggcggcgctctccaacgatatttatctgaatagcgcgttattcgctcgcgtggatgccgtctggcaacagcgtcactcactggggctggatgatgagtcgctacggttggtcgatgtgatccatcagcgttttgtgttggcaggcgcgcagcttgccgaagaggataaagcgcgactgaaggtattgaatactgaatccgcgaccttaatgagtcagtttaatcagcgtctgctggcggcaagtaaagcgggcgggctggcggtagatgacgcgcattgcctggcaggattaagcccggaagaaatgaccgtcgctgctgaagcggcgcgtgaaaaaggcctggaggagcgctggttcattccgctccttaatacgacgcaacagcctgcgcttgctacgctgcgcgatcgccagacccgcgaaaatttattcgcagcgtcatggactcgggcggaaaaaggagatgcccacgatacccgcgctatcgttcagcgtctggtagagattcgtcgctgtcaggcaaaactactgggtttccccaattatgccgcatggaaaatggccgatcagatggcgaaaacgccgcaagccgcactgagctttatgcgtggcattgtgccgccagcgcgtcagcgggtactcaatgaacaggcggaaattcagaacgtcattgatggtgagcagggcggctacaccgttcaggcctgggactggatgttctatgccgaacaggtacggcgggaaaaatatgcgttagatgaagcgcaactgaagccctattttgccttaaatacggtgttgcaagagggggttttctggaccgccaaccagctattcggcatcaccttcgtcgagcgttttgacattccggtgtatcaccctgatgttcgggtgtgggagattttcgattccgatggtgtcggcatggcgttattttatggcgacttcttcgcgcgggactcgaaaagcggcggcgcgtggatggggaattttgtcgagcaatccacactcaatgaaacccggcccgttatatacaacgtatgtaactatcagaaacctgttgatgggcagcctgcattactgctttgggacgacgttattacactcttccatgagtttggtcatacgttgcatggtttgtttgccgtccagcgttatgccacgctttcaggtaccaatacgccccgcgactttgtcgagtttccctcccagattaatgagcattgggcgagccatccacgtgtgttcgaacgctacgcgcgtcatgtcgacagcggtgaaaaaatgcctgctgatttacaggaaagaatgcgcaaggcgagtttatttaataaaggttacgatatgactgaattgctcggcgccgcattgctggatatgcgctggcatatgctggaggagagcgtagcagagcagtctgtcgctgagttcgagcagcaggcgctggccgccgagcatcttgatttaccggcagtgccgccccgctatcgcagcagttattttgcccatatcttcggcggcggctatgcagcgggatactacgcctatctgtggacgcaaatgttagcggatgacggttatcaatggtttgtagagcagggcggcctgacgcgtgaaaacgggcagcgttttcgtgatgctatccttgcccgggggaatagtactgatttagaaacgctttattcagcctggcgtggacatgaaccgcatattgaccccatgttgcaatatcgtgggctcgatcgctaagctgatacggttgttcggcactgtcgaacaaccgcctgaaaatgaatcctgaacttctgatgacagccagttaaatttatggggttaagttgtctgaatataaagagggcgtgcattcggatttttctacttatttttccgtggtggcttgattgccaaagatttattaccgcttcgctgttgatgttttcaaaaaatatatcttccgccatgtgatggtattatgtaaataatgcagaaatgaatttgacactgcgcacagggcgactagatttagaactgtatcacatgatatgagaagacatatcatatttaaaacgcaacatcatcatgaggattatattatggcagaacatcgcggcggttccggtaattttgcagaagataaagagaaagcctcagaagcaggtcgtaaaggcggccagcatagcggtgggaactttaaaaacgacccacaacgtgcatctgaagcgggtaaaaaaggtggccaaaatagccacagtggtggacggaaatccggcaattaattttactgctgatatttcataaatatattctgaaatattgcacatacgatgcgggccataggctcgcatttttttattctgaccgggagttattctgaccggtcagatgaaattattgtttatgctttcttcgttaacagaaaaagcaattcagcgagggcgaagcgtacgcatttttccaatacttcctgacaatctccgttgaaatgttgtcggcttgtaaaagttgtattgttaatattccaggcaaaccaaactgtgcccgccggcgtgccatcttcgccgccttccggaccgccatagccgctgatcgctatgctgatattgacctcagcctgatccttagcgccctgtgccatttcagtaacaaccgcttcgctgacggcggtatgttcggcaagactgtggcgttgtacgcgtaagatttttgctttggcttcatcagtaaaggtgacataccccacaccgtaaaatgagggcgtatcttctgctgcgcacaatgctgaagccagtttcccgccagtgcaggattctgcagtggtcagacggagtttctggttaaccagtaaatcaccaagtttttttgtcaggctatcgacggattcggcttcatcaagggtgacaatatcgtgctgttctaatctcatcgtttatttttccgttacagagacaaatgaaatctgttcgttcttctcaagtatggcatatttattttatgacattgtcagtgaatgattattttatccagttaccaacaaacccgctgttgcataacttgcttactttcttacggcgatgactgtcattgattatgtggaaggccattatcctcaaaaaataaagccgattattctgaattgctatccagacgttgatgcatatgacttcagctatgtggcaagttaactattacgccgttacgctttcgcgctcactggcgctgatatcggttgcatattaatccggatgggttgattttattgcttaatattctgcgggtaaattcatgtttgtaaaaactaaaaatagcggccagacttaatacgtcaaatagacgttattaaggagagagcatgaaactacaggtggctgcatttttaagttttctgataatgccttacgcgctagcggatgatcaagggggattaaaaaaagacgtggcaccgccgccgcctcatgctattgaggatggttatcgcggtacggatgatgcagaaaaaatgaccatcgaacaggcaaaaaccctgcatgatggcgcgaccgtttcgctgcgcggcaaccttattgatcataaaggcgacgatcgctatgtatttcgtgataaatccggcgagattaacgtgataattccttccgccgtatttgatgggcgggaagttcagccggatcaaatgatcaacattaacggtagcctggacaagaaagcgaaggaaccgcttgttcgcgtgaaccgactgcaaaaataacgcgcgctaaccggcaatctccaggtcagccatacggggcacgcggctggcctgataccatgggtcttgtaaaagcgcctgggggacaaaaggtcccataatgtcttattcaggtctggttgcgtatcgtttaagcttcattgatattgacggtgctacagtcgttagcgatccgttatcctcgcaagaatttgcccggtagcgtataagcaaaacacaaatctatccatgcaagcatttaccgctggtgaaccggcggtttttttttgcctgccatccagacaaaagcggccccttgcgcaacgatgcagcaaggggccggctctgcgagggattatctccgttcattaatcatcccatttgtgactgaaccaggcggccagaaatccggaaaataaaataattcctaatacaacgataaaaaggttaatactgcctaacatctcgtttctccttattttagtgtgcatcctcttttttaaaaaacctcgtacagactatagtactaatttatacttaagcaaagtctgaattgcgtatttattttactggaagggtaaagcattagaatattttcgtcagcgcccaggaatattcctgaattaccgcagtgacagcagataattagcctgcaatatatagggttaacccggtgcgccagaaactgcgcacatcactggctgcagataattaacaggtaatagcctgttgcgtaggggtaatccgcattccttttaacatcagtgcccaggcgaacacaatggcgattatcaggacaacgaaaagcgaccaggctggaagcgtcgtcaggatgacgccgctggccagcgggtttaccgccgcacccagccagcccagcgattgcgctgaaaaatagctggctttcatcccggcaggcgcaatgttgtcaattaacatatattcgccgggggcataaataatttcgccaatcgtgaatactgccgctgaaagcccccaaaaaaacagattgtcgcctgaaaaaataaatccgatgagcccggcgataaaaaagacggtgccggtcgtcatcattggtcgaatattgacggcggtaagtcgacggcccacggcgtattgcaaactgaccacaataaccgcattaaccggcaggacgacggctaccactttttccgcgaagccgctatcggcaacgaccataacgtactgtgaaatacaggacgcaaaggcgccccccacaaaggaggccagaaatgccgaaagcgtaaaccacaataatgctttgtcgcgcagcagaacggagggagaccagatagcggcatttttcccctcgctggcggcaaccgatcgtgtcacccatacctgaataaagaccagcgggaatgcggagcagatggcggcaagccagaagggtaaattgatgctttgcatcaccagcagcgtgccgagcggcgggccaaccgtccagccgatattgagtacggtatagttgagcgaaaaaatccgtgtttttgttgtcgcggtgagattatcggcgaaccaggccttcaggacggtagaaaaaaccgaataggcgcagttaataagcgcaaaaagcaggacaaccagtacgacattatgcaccattgggatggcgataaatccgcaggcgaaggcgataatcgcgagtaacatgtagcgctttttatcaaacttgtccgccagaatcccaaagccaagactaaagatgacgccgatcgttaacgcgctggtcagcgcgtagccaatcagatccacgcctaaaccgtactgacggttaagatagatggtcataaaggggagcgtggcgccgcgtccaattgtcaataacagcgatgaggcgagtagagccaacgtcgaacgtctcaatcctggattcatttttcctgcctgaaatggaggttacgtatcgggacgttttaatctaccgtgcccgcaaaagcatgatgtctatacgctatagcgtagtcttaacataccataacgcaggattttgcccatcgtgtgttgttcaatgccatgctcacggtaaaaagaaaagtcctgttatggcgcactgatttccgataacttacctttttacaaaattttaataatgacaggggccgatgatgtcgcgtaaagacggttttttggcgttactggtggttgtcgtatgggggctcaattttgttgtcatcaaagtaggcctgcaccatatgccgccattattgctggcaggattacgatttttactggtggcgtttccggcaattttctttgtcgcccggcctaaagtcccgcttacgctgttgctgggctatgggctgacgataagctttgggcagttcgcctttctcttttgcgcgataaagtttggtatgcccgcaggactggcgtcgttggtattacaggcgcaggccttttttaccatggcattgggggcgtttgtttttagcgagcggttacaacgtaagcagttggcggggatcgccctggcgattataggtgtactggtattgattgaagccagtctcaacggacagcatatagcgatgtcgggatttatgctgactctggcggcggcatttagctgggcctgcggcaatatctttaataaaaaaattatgcaacatagtccgcgcccggcggtgatgtcgctggtggtctggagcgcgctgatcccgatcctgccgttcctgctgtcatcgctgctactggagggggcggatcacattacgcaaagccttattaccatcgatatgacgacgatattgtcgctgctttatctggcttttgtcgccactatacttggctacggcatctggggcgcgttactggggcgctatgagacctggcgcgtggcgccgttatcattgctggtgccggtagtcgggctggcgagcgccgcggtgttactcggggaaacgttgaccgggatgcagcttgcgggcgcagtactgattatggctggactctatatcaatgtgtttggatttcgtgtgcgccgtactgcgcgtgtcagcggatgaggcattatgttactaagaagacaaacgctaatttcagaccatgccgcggggtaatagcggcggacttgtcatagccagacggtactaaaaaaatgccccgcaaaacggggcaaagaggttaaaggtgttggtcgttataatagggcacgcctaattcatctgacttatcgctgttcacgctcacggggtgaaggtcatttggcggatcgcctacacagggcagcagcatcacatcgcggctattttgcgccacaggtaacaaagtttgttctgcaatgccatatccggaggcgataagtaacagacccggcagggcgggaaacagcattttcatggtgctcttcgcgtggcgcataaacaaactagtagttgccatggttcagcggcagcatataccgtgattcgccatgcatattggtgatccggtatttgtgtggcggcacatcaaaatagtttttgaacgtccgggtcaatgtttgctgtgactcaaagccatagcgttccgccagatagagaatgggctcgttgctctcttttaatttttgcgcgatttccgtcattttacggctgcggatgtattggcctaatgaatgaccggtctcttttttaaacatccgttgcaggtgccatttggaatatcctgaacgctcagacactttttccagtgagagcggcgactccaggttatcctcgatccagtccaaaatgctatgaatagtaatagcgtcagtgttgcgtctggacatcgtcatacctcttttttgtctacggcagaattttcttgagcaaatactcaagcgttgccacttcgtccgccgttaagttttttgttaattcctgatgcaggtcttgccctggtcgttgatgacattgctcacaaattgccgcgccgtccggcgttagcttcaccagtacgccgcgtttgtcattaggattcggcagtctttcgatccagcctttgcacagcaggcggtcgagcatccgcgtcaatgcgccgagatcgacagacagcacttttttaagttcaaccggggtaatacatcccgcgcagcgtatcgagcaaagcactttaaactgtgttgcggtgatatccagcggggataaatagttatttaacaggcgatcttttttctgatttaccatgtagatcaagcgacccagcggaatgatttcattgaacagatcactggtgcttttcaaaatggttgccccggcaagtaattaatttcgtcagatactattgcccaggcaagtataagtcaactaaatgaattggccgatgccacgatttgctaaaaggcgtccggggtattgtgctgtgataacttgtaactaattgataattacaggttataggttgtagaggatattaacttgcacactggcgaaatggcgcgcctgggcaatttcactttatacttccggttcatgaaacgctgatgggtaagagatagtattatgatggatttgtttaaagcgattggattggggctggtcgtactgctcccgttagccaatccgctaaccaccgtggcgctgtttcttggccttgcgggcaatatgaatagtgcggaacgcaaccggcagtcctatatggcttcggtttatgtcttcgctattatgatggtggcgtactacgccgggcagttagtcatgaacaccttcggtatttcgattccagggctacggatcgccggggggttaatcgtggcgtttatcggcttcagaatgcttttcccgcagcagaaggcgcatgagtcgccggaagcgaaaagcaaatcggaggagctggcagacgaaccgacggccaatattgcgtttgttccactggctatgccaagcaccgcaggaccggggaccatcgcaatgatcatcagttccgcttccacggtgcgtcatggcggcgagtttcccgactgggtcattatggtcgcgccgccgattatttttcttgccgtggcggtgatcctgtggggatgcttacgcagttctggcgctattatgcggctggtgggtaaaggggggattgaagcgatctcccgcttaatgggattcctgctggtgtgtatgggcgtgcaatttattatcaacggcgtgttggaaattattaaaacgtaccactaaggcgcattttcgtctgccggaaacctgttcccggcagacgaatgtcttaatgcggttgttcttccagcgtcactggccatttgcggaatatgagcacagcccataccagcgcggcacaggcgggtatggcgccaatatagccgatggccgacattgaccagtgcaaactcacctgattacctaccagcgcgccagcgccaataccaatattaaagatgcctgaaaatagcgccattgcgacatcggtcgcgtccggggccagcgccagtactttcacctgcataccgagccctatcaccataatcgcgatgccccagaaaatgctcagtatggccagatgcgcttcgctctccgccgcgggcagcagcagcagcagacagacaaccagcagggcaatagcgatactgacgagcgacgaggcatggcgattacccagtttaccaaacacgaggctgccgatgatcccggcgccgccgaggatcagtaacaggacggtagcaaaattcgcactgagcccggcgacattctgaacgaacggttcaatatagctataagctgtgtaatgcgcagtcaccacaacgacggtcagtacatagaggctcatcagcgccgggcgtcggaatagcaaaggtaaactttttagtgagccggaatgctcgctcggcaatttcggtagaagcttaatcagacatagcagcgtaattaatgcgcccatgccgatggcaaaaaaggtggtgcgccagccaaaatactgaccaacaacgcgacctatgggcagcccaagcaccatggccaacgcggtgccggtcgctatcagacttaatgcctgcgcgcgtttcccggcaggggccaggcggatcgccagcgaggcggttatcgaccagaaaatagcgtgggcgaaagcgataccaatacggctaatgaccagcacggtaaagttccatgccagaaaggagagcacatggctggcaataaacaaaacaaacagataaatgagtagcttacggcgctccatttgactggtaagaagcataaaaggcagcgacatgacggcaactacccaggcgtaaatggttagcatgatgccgacctgcgcggtttgcatatgaaagctttcagcaatgtctgatagcaaaccaactggcacaaattctgtggtattgaaaataaaagcggcaatagcaagcgtaactacccgtagccacgcgaccttgcgggaaactggattgattgtcataaaaatatttcgggttagttgcgagaaggtgagaccgcgatcttaaaacgtttactggcgaaaagacaatcattttgtgacctgcttctcatttacttcgcaggccgtttcgtcttcagtcggtgctcgccagttgggcgttaagtaactcgataaaggcctcaagctgacgcgtcatcgccccgcgccgccacattagccatgtgttaagccagcgccacttctccgccaacggccaggcttccacctgatgatgtcctggcatactgttgagcatacttgctggcatcagcgcaatacctgcgccggcaattacgcacgccaacattccatgatatgactccatttcgtgaatcgtaccgggggtcgcgccatcggcatgaaaccagctttcgaaatgccgtcggtaagaacagttggcgcgaaaagcatagatgttataaccattcacctcgctggcccgcgaaacgacggaatggccgtgtggcgcgacgatcatcatctcttcctggtaagccggtataccttccagccccggatgcattagcgggccatcaataaaggcggcgttcagctttccctcgagcacgccatccagcatggcgccggaaggaccggtcgttaacgcgaactgaattttagggtaacgctggttataacccgccagcagcgcggggatacgtacggcggcagtactttctaacgcgccgagtgaaaacagtccttgcggttcctctccggcaaccaccatgcgggcttcatcgaccagcgccaggatctgctggctgtaacgtaaaaagttatgcccggctggtgacagcctgagtcgctggttttcgcgaataaacagagagacgcccaggtcggcttcaagctgacggatacgcgtggtcaggttggacggaacgcggtgcacttttgccgccgcctgcgtaatgctgcccgtcagagcgacagcgttaaacatttccagttgcgtcaggtccatggttttctcaattcgtgaatagtctggttaatattattcatttttcagaaagggtaaagggcgtcatgatggtacaactcccctgataacgagagaaagaacatgaccatgatgactgcaacacaggcgttatccgtgaatcctgcgaccggccagacgctggcggcaatgccctgggctaacgcgcaagagattgaacatgcgctgagtctggcggcgagcggtttcaaaaagtggaaaatgacatcggtagcgcaacgggcgcaaacattacgcgatattggtcaggcgcttcgcgctcatgcagaagagatggcgcaatgtattacgcgtgaaatgggtaaacccataaagcaggcgcgtgcggaagtgacgaaatccgccgcgttatgcgactggtatgcggaacatggcccggcaatgctgaatcctgagcctacgttggtagaaaatcagcaggcggtgattgaataccgtccgctgggcgtcattctggcgataatgccgtggaattttcctttatggcaggtgttacgcggggcagtgccgatactgctggcggggaatagctacttgttaaaacatgcgcccaatgtcacgggttgcgcgcagatgatagcccgaatcttggcggaagccggtactcccgctggcgtctatggatgggtgaacgctaataatgagggcgtgagtcagatgattaacgatccgcgaatcgcggcggtgacggtgaccggtagcgtgcgcgccggcgcggcgattggcgctcaggctggggcggcgctgaaaaagtgcgtactggaactgggtggctcggatccgtttattgtactcaatgatgccgatctcgagttggcggtaaaagctgcggttgccggacgctatcaaaacaccggacaagtctgcgccgccgccaaacgttttattgtcgaagagggcattgcgcaggcgtttaccgatcgttttgtggcggctgccgcagcattaaagatgggtgatcctctggttgaagagaatgacctggggccgatggcgcgctttgatttgcgtgatgaactccatcaacaggtgcaggcttccgtcgccgaaggcgcacggctactgttgggcggggagaaaatcgccggggagggcaactattatgccgcgaccgttctggcggatgttacacctgacatgacggcatttcgtcaggaactttttgggcctgttgccgccattaccgtcgcaaaagatgcggcgcacgccctcgcgctggcgaatgacagtgagtttggcctgtcggcgacgatctttaccgccgacgatacgctggccgcggagatggcggcgcgtcttgagtgcggtggggtattcattaatggttacagcgccagcgatgcgcgtgtggcattcggcggggtgaagaaaagcggcttcggtcgcgagctttcgcactttggtttacacgaattttgtaatgtgcagaccgtctggaagaaccgcgtctaatcgccctgacgtcgcgtggcgccctctgctatactcgcaggccttttcagacctgcgagcaaggagcatgttgtggccagggccatggataatgcaattttagagacgattttacagcgcgttcgccccctcattggccagggcaaagtcgctgactatattccggcattagcgtccgtcgaaggttcaaagctggggatagcgatttgtaccgtggacgggcagcattatcaggcgggcgatgcgcacgaacgcttctctattcagtctatttcgaaagtgctcagtctggtggtggcgatgcgtcattatccggaagaggagatctggcagcgcgtcggaaaagatccttccggctcgccgttcaattcgttggttcagttagagatggaacaaggcatcccgcgtaatccatttattaatgcgggcgcgctggtggtatgcgacatgttgcaaggccggcttagcgcgccgcgtcagcggatgctggaagttgtgcgcgcgctttgcggcgtatcggatattacgtatgacgctacggtcgcgcgctctgaatttgagcattccgcccgtaacgccgctattgcctggctgatgaaatcattcggtaattttcatcatgatgtgcctaccgtgttgcaaaattactttcactactgtgcgttgaaaatgagctgcatggaactggcgaggacgtttgtctttctggcgaatcagggcgaggcgtttcatctcgacgagccggtagtgacccccatgcaggcccggcagattaatgcgctaatggcgaccagcgggatgtatcagaatgccggcgagtttgcctggcgggtgggattgcccgctaaatccggcgtgggcggcggtattgtcgccatagtgccgcatgaaatggcgattgccgtctggagtccggagctggatcctgcgggaaactctctggcaggtatcgccgcgcttgagcaattaacacaaacgttaggacgttcggtatactgatgaatgcgcttgaaccgctctttgcccgcctggcgcgatcgacatttcgttcgcgttttcgtctcgggataaaagaaagacaatattgctgggataaaggcgcggaggtgattgataaacacgccgccgattttatcgcccagcgactggcgccagctcacccggcgaatgatggtaagcaaacgccgatgcggggccatccggtatttatcgcgcaacatgcgacggcaacctgctgtcgcgggtgcctggcgaagtggcaccagatacctcagggagaaccgctgagcgaagcgcagcaacagtatattgtcagcgttatccattactggctggtcatacaaatgaatcagcggtagagcagcgcgtcgttgctgacgctttccctgataaattaccctcataccactgatagcagccgttgaccgtcatatatctcatgcgctgaagcgcatatttagttacaacatacagttagttgttttttttcaacgcctgtcagcactgtgcaaaaaaatgttctacagggcagggaacccgtgtatcaccagaagcttgcaaccttgatctggatcacgtttaatgacagtgctttttcaccagctgaagataatcatgatcgttagaccacaacagcactggattcgcctgatatttgtctggcatggttccgtgttatctaaaatcttttcacgactactccttaactttcttctttctatcgccgttattatcatgctgccctggtacacaatgctgggtattaagtttacccttgcgccgtttagcatactgggcgtcgctatcgccatttttcttgggtttcgcaataatgcctgttatgcgcgttacgtcgaagcccgacatttgtgggggcagttgatgatcgcttcacgctcaatactgcgagaggtgaaaacaaccttgcctgatgaacgcggtatcgaggattttgttcggttacaaatcgcttttgcccactgtttgcgtatgacattgcgtcgacagcctcaaacgcaagttctgggaaactatcttgaccaggaggcgttacagaaagttgtcgcttcccattcccccgctaaccgtatcttattgctgatgggagagtggctggcgattcgccgccgcagcggaaagctttccgatattttatttcatagcctcaacaaccgcttaaatgatatgtcgtcagtattggccggctgtgagcgcatcgccaacacgccggtgccttttgcctatacgttaattttgcatcgtacggtttatcttttctgcattatgttgccatttgcactggtggttgatctgcactatatgacgccgtttatttcggtgctgatttcttatacgtttatcgcgctggatgcgttagcagaagagttggaagatccgttcggtactgaaaataatgatttaccgctggatgcgatatgcaatgcgatagaaatcgatttactgcaaatgaatgatgaaagggatattccggcaaaacggataccggataaacgctatcaactgacctgagctcgacttaactggcgcagaatgttcatctgcgccataacctgaatagcaaagtttaatagccttctccaacgccggttttggctggaccggagtagtggacatgaacgattcgccatcctgtgtttggtatcttcgcccacacctggctttcgcggcctgtcgtgtgttgagtctgcccattatcacggcgtaccgcggtaaaatgccagtcgaactctgcaacggcggcattgccatacacatgaatagcagggggagcgtccagttttaatgtgcgtttgctgaaggttttacccatagtggtgccataaaaattttcagcgatctgcgaccatccgcgttcgtgaccgcgtggatgaataaaactggtttccggtgaaacataaaagagctgcttgcctaacgttgggtctgccttatctattgaataaaggtaacggttaatgccttctgtaatttcttgtttaacggtcgacgtagcttcattttgtgcggcggttggcgttgccgctgatgccgatgacgccatcagagttaacgttatcgcggcggccgaaaacaatagtgacgttttttgcataatagttatacccatatggtctgtttttgagacgctttatctttcctgttacgttcacctttatactaaaggagcatggctcacgaacaataaaaaacatccttctataaaactaccccgaaaagggagtagtgcaattaagaatatcgtatttgtttgtaacggcatgactcaaaatatcaacatttagagtttcagtattgttgttgtccattgacttacttttatttttattaccactggtaaatagttaatcttatgaatagtgatacacaaatgaccgtttgcgctatgtgataattaaccatagtaaaaatacacgaagcgaagaagtgctatttcagtagtactgatattttcataacgctaatttaaaaataaatgtaaacgtaacaaattatacacaaaaataagaagggctgtggcctcaactgactggattatgattccgtcttaccgaatgtcagccgaatgttcagtgccattctcgccctggcatccccgaccgtaagcctgttctctactggtaacccccttgttattacagcagaaaacagggcatatcattgatgtagtcatgcttaacttgcattttaacatcactaatacatagcaagctaatattacactttgaaacttaacgcacggtaattgttagtgatattgtcctggacagttccgcgagcaggctttgcggaaagtccaaaaataagacaaataaggcatataaaatgaaaaaagtagtggtgttatctgcggtagccgcagccgtaatgatggctggagccgccaacgcagcagaaatctataacaaggatggcaataaactggatttgtatggcaaggtcgacggcctgcattatttttccagtaatcatagtacggatggcgatcaatcttatatccgtatgggtattaaaggcgagactcaaattaccgatcaactaaccggttttggacagtgggagtatcaggtcaacgccaatcgtccggaagatggtgactccagcggttccccgcaaagctggacgcgtctcggttttgctggtttggcatttgccgatatggggtctgttgattatggtcgtaactatggcgtgttatacgacattggttcatggactgacgtactgcctgaatttggtaatgattcgtatgaagcttccgataattttatgaccggacgcgcgaatggcgttctgacttatcgcaataatgatttctttggtctggttgatggtctgaatattgcgttgcagtatcagggtaaaaatgacggcctgtcgaaagaaggcgatcctttaagtaataatgccagaaaaagtatcgcgtaccagaatggcgatggtttcggggcatcagcgacatatgatttgggcatgggggtgagcctgggggcagcctataccagttccaaacgcacgcttgatcagatgacgcaagataaatacgacaatggcgaccgcgctgaagcctggactggcggcgtgaagtatgatgccaataatatttacctggcggcaaactatacccgtacttatgatatgacctatatgggcgatacattgggcggctttgcacataaaaccgataactgggaaatggtagggcaatatcaatttgataatggcttacgcccgtcactggcgttcctgcaatccagagccaatgatgttgatggactgggttcgttcgaccttgtgaaatatattgatgtgggttcctactactacttcaataaaaatatgtccgcgtatgttgactacaaaatcaatctgctaaaagatggcaacccatcgaatcctaatacagacaacaccgtggcgctcggcttagtctacgagttttgataaaacttgctgattaagacagtttagggataccctccttttcccaaaactgtgtcactgcttaacctttattattgttaatttattcttttattatttcaggacgcttctggcgtccttttttattgactattcgttgactattcgacttcgatctcgcgaatgcgcattctgctactgtcatctatctgcactttgcctgaatgacaaaggggacaacagagtgtggatgtttgagaggtgaagggttgattacaggacagacaccaaccttgcgccggtgcgatagtaatgtggaaacgcgcattgtcagcaagggtatgacgagcggcgacgtccaggccaaaatgcagcgccggcacctcaacacaggccataacgccaatctccagccagacttgctttaccttgctgaactggtgatttactgcctgttcctccagcaattcgataatattttgcgccagggctaattcatgcatgggccagctccttcattcaacaatatttacggcgacacaaggatcaattacctgtaactgttgcgaccacaatgagagtggaatagtggccagttcgcgagcaatgacgccgtcaggttgggcgtgacgtgtggtaggcgagataatacggtaatcaagaatattgcctgacgtcgtcagtctggcctgatgaactaaccatcctcgcgcggtttccactaccgctattttccattcgccatcatcaaaacgattccagcgcagggtgggaagggcgctcaaacttcgggcgagcgtaatgcagcgggccagcagacgtagcgcagtcgttttaccgctaagacaacaggctgacagcagcggatattcgatagccagaggcgagacatccaggggaccatgggttattaacgtatggtccggggacgatgccatcggtagtgtaggtgtaatgatattctgtactgccgccagccagcgggcggtttcagaacgctcttgcaaaaaccaggcttcccagccctttacgccagcggcaagccaggtctgaggatcatcgtcaaaaaagattgtgcttgccagcggggataactctccgcgacgtaacaacgcccattcttcagcggttgcctgtcggtggctaaacagggggagccagtctgtcaacgcgcgacggagcgtttctcgcgccagctcttgttgtgcggcctgcatatctggcttcttttcaggaaacaacagtaaagccgccgccgcgctgtgcgcctgagcgcacaacgtaaacaaacgtgaaataagcgtttttgcgtataccggcgttgcgccctgtaacaaacgaccgatcggcgcctcctgccagataatccgtagcgggtgagaatagacggtcaatctttgcacgaactattaccttcatcgatcaccataaacccggacttactggtttcgcaaaccggacagcaccagtaatcaggtaactggttgaagggcacgccgggtggaatttgccatacatcatcgcccagcgcagggtcgtaaacccaccaacatactttgcactccatgcgcaccactggctcattttctgtgaccgggtattctttcaaccattccaacgtattttttagccccgcgtaggcatcttcaatatcgtcgatgcctgcaacggcgatatcaggaatgtccgctatctcaatcatatcttgcagtaatgtattcatatcattgaaatagttgacccgccatacgccgggaaaatgcgtgcttacaatccggcatttaccatatccgcgtgaaaaaatagcgctacagccttcgcctaaaaaatgatccagatactcgcgatcggcatcgtttactggcaacagcgttaagttaatgatatgtggctcttttaccggctgttttacgcgctcggctatttcatgcgcgataaaggcgccattcatcaatcccgccggttgtggcggcaattctggcgtaatcggcggctgcggatgcgtctgccagatgctctctgggatcgggccaatgataatttcatcggcaacccgttgctggtcagcgttatattcacgcacacgccagacgcccgtaaaaaccgtctcctgaatacgctgttcttttccatcggataatagtacccgggcggagatttcaccttcgccgagcagttgatccaataaaccgctattctgttgctcagtggcattcagcttatagctcaggggaaaggggagcgttgccaccgggttatccatatcgcgaataagcgtagtcaggatgtgtctggcaacacggagctcagcgggcagcgcctgttccggtaaaaccggcgtcagcgggagattaatgccggcggggatgggaagaaagttaaagtcttcctcttctggctgcgatcctggtccggcaatattaacgactggaatagttctggaatgattcacgtgtgttacctttcattctattgcgtgataacgggaatatcctgacgatagcccggtgtggtcagcaatgcggccacccgctgagagtattcttgccagctatataatcccgccagactgccgacaaaacggtgctggcgaaagaaaagcagcgccggatatttcagaatgcgatactcccgggcgatcagttcactctgttcgctatccgcaaatgccgcggtataagacgtcgccggaaattgcttgaggatctccgggatgatgacccaactgtcggcgacttccggatgtttgttggggtcgctttgcagcaaaaccagcagagtcggatgcgcattaatcaacgacgggagcgtttgcgcatcggtaaccagaaagcctttatccgccagtggacaaacaggattttggggtgagatagtcatttttttaaatgctccggtaattcaggcgtgcgagacaataaatcggcaaaaccggtcagcggatcgctttgcgtgagcatggcctgttccagtgagtccagcgccgccagtacctcagcggcttccgcttcgtccatttctcgtcgtgctgcgccgccaaatgtcagcagccatgcgcctgctaaggggggagccacaagccgaatatcaacgtcgataagctcgccgtgtcggtcgcggcatttggcgaaccactgaccgggtgaaataacctgcacaggaacgccaatacacattatgatttctctctctgtagcacccgaatatcgccgacccggcaagcgctttgcgcatctgggcgttcatcttcgtagcgttccatacacaggctgtaatgattgagtctttcagtgggcaaggccgctgaagaggcggtgataccccattgcgccagcacttcctgcgcgagatagaccgcaggcatcagttgcgcctttacctgcggcgtaagactcccgccatagtcatccagacattccggctgcacgccaatcagcacaatctccgataactggccgccggttaattgcagcaatgccagcacttcagaaaaactggtctgatgtaaactgagttttttcgccgtcagataggcgggaacctgttcatcacgaaacatcgccagcgaacctggcgccataccaaaatcgatagcatccatgattaacagtttttcggtctgttgcagccagggcagcagcgccagcccctgcgtaccgccatcaacaacgtcaactttctcgttatcggcatactgttcaaacagcttttccgccgctctgacgccgaacccttcatctgcccaaagcaggttgccaagccctaagattgttacttctgccattgttatcacctgaaccagcgccagccgcttatcatgacggaaatcacgctttgtcggctcataatgtcttcgcggatagcggtataaacatgcgcaatgacgaaggcgataatgaaccacatgcccagccggtgccagaaatgcagcgcgaggctatcgttgccagtcaggcgaatcatccagccaaaccattgatacgcccaactgtctgttccaagtccttcgccatagagcgcaaagccgctacacaccatcagtacggacatccagaaatagaacattaccgccagtcccgctaccggattatgtccatagtaacgatgggcctctttttcgaggaaaaaataccagcggatttcgctgataacgcctttgcgccaggcgcggcgccagaacggaaccagaaacatctccctggcgtactcattgccgacacatgcccagtaaatacgaaacagcagcgcgacagtaaaaatatacgccgtggtaaaatggatcagtcgtatccagcccatccaaaacataaaggtcgcttcaccttgaatcgatggcagggggcggccaatgaaatatcctgtaacagccaggacgacaatggataacgccgtgatccagtgccataaacggaccggcgcttcatagatatagtacccctggctggttatttctttgagatgcattgagacctccgaatcgtcgtcatcgtacctgaaccctgaccagctcccctccatgattatcaataacatgggtggagcaggccaggcagggatcgaagctgtgcagagtacgtaaaatctccaatggttgatcgggaacggcgagtttagtccccattaacgccgcttcgtacgcgccaatttgacctttatcgtcacgtggcccggcattccaggttgtcggtaccacacactgatagctgtcgattttctgatttgcaatttttatccagtgccccagcgcgccgcgcggcgcctcgctgaaaccaacgccttttgccgatgtaggccaggtatcgggttcccagagcgtgacgtttgccgtcgccgtatcgccggacttgaggttacgcatcagacgatcgaagaaatattgcagcgtattgcctgcccatacggattccagcgcacgcgcggcagtacgtcctaatgtagaaaagagcgcttctttaggcagctttaatacactcagcagttgatccacgggttctttaaattccggtttattttgatgatatccaatcagataacgcgccagcggacctacctccatcgcatgtcccttccagcgcggcgatttaatccatgaatatttagcggactcatccacctgttcgataaaggtttttgtgcctttatagtgttcgcccatgaccagttgcggttcggtcagaccatcccacggatgcaggcccttatcgttattgccgttaccataggtataccaggagtgagtgacaaactcctgaatctcatcgggggcggttaaatcgacaggatgaatttcgtcgaaacgaccgttaatgatagccccacgcggaagcagaagattactggcggaataatcgttagggttatccggaaactcgccataagccagcaggttcatgctcgataacccgccgccgatttttgcccagtctttgtaataactggcaatcagcaagacgtccggaagataaacctgttcgcagaactggcgagctttttggatgatggaactgacaaggttcaggcgttccatattcactgcgccgaccgcgcccgtttcgtcaaggttgatggcgcaaggaacgccgcccaccagccagttaggatgcgggtttttaccaccgaaaacggtgtgaatttttacgatctctttttgaaaatcgagcgcttcaagatagtgggcgaccgccagcaaattggcttccggcggaagtttcatcgccggatgtccccagtagccattacggaaagggccaagttgaccggactcgataaaccgcttcagtcgattttgcaaatcgcggaaatatcccggcgaggatagcggccatgcggaaaggctttgcgcgatggcggaggtctgatgcgggtcggctttcagggcggcaaccacatcaacccagtccagcgcgtgcagatgataaaaatgcaccaggtga
